(19) United States
(12) Patent Application Publication
(10) Pub. No.: US 2024/0226271 A1
(43) Pub. Date: Jul. 11, 2024

(54) MODIFIED CORONAVIRUS STRUCTURAL PROTEIN

(71) Applicant: MEDICAGO INC., Quebec (CA)

(72) Inventors: Pierre-Olivier LAVOIE, Quebec (CA); Marc-Andre D'AOUST, Quebec (CA)

(21) Appl. No.: 18/024,140

(22) PCT Filed: Aug. 31, 2021
(86) PCT No.: PCT/CA2021/051201

§ 371 Date: Mar. 1, 2023

Related U.S. Application Data
(60) Provisional application No. 63/073,327, filed on Sep. 1, 2020.
(60) Provisional application No. 63/211,716, filed on Jun. 17, 2021.

(51) Int. Cl. A61K 39/215; C07K 14/005; C12N 7/00

(52) U.S. Cl. CPC A61K 39/215; C07K 14/005; C12N 7/00; C07K 2319/03; C12N 2760/16122; C12N 2770/20022; C12N 2770/20023; C12N 2770/20034; C12N 2770/20051

(57) ABSTRACT

Modified coronaviras spike (S)-protein, virus-like particle (VLPs) comprising the modified S protein and nucleic acids encoding modified S protein are provided. Methods for modified S-protein and VLP production in a host or host cell are also described. The modified S-protein may comprise a transmembrane domain (TM) or portion of a TM, and a cytosolic tail (CT) or of a CT, wherein the CT or portion of the CT is derived from an influenza hemagglutinin (HA) protein and wherein the TM or portion of the TM is heterologous to the CT or portion of the CT. In addition a method for inducing immunity to a coronaviras infection in a subject, comprising administering a composition comprising the modified coronaviras (S)-protein or VLP to the subject is described.

[0001] The contents of the electronic sequence listing submitted herewith as file 18636_0020U1_Sequence_Listing.txt; Size: 854,569 bytes; and Date of Creation: Jul. 17, 2023, is herein incorporated by reference in its entirety.

### FIELD OF INVENTION

[0002] The present disclosure relates to modified viral structural protein. The present invention also relates to virus-like particles (VLPs) comprising modified viral structural protein and methods of producing the VLPs in a host or host cells.

### BACKGROUND

[0003] Coronaviruses (CoVs) are the largest group of viruses belonging to the Nidovirales order, which includes Coronaviridae, Arteriviridae, Mesoniviridae, and Roniviridae families. The Coronavirinae comprise one of two subfamilies in the Coronaviridae family, with the other being the Torovirinae. The Coronavirinae are further subdivided into four genera, the alpha, beta, gamma, and delta coronaviruses. Members of alpha coronavirus and beta coronavirus are found exclusively in mammals. The alphacoronavirus genus includes two human virus species, HCoV-229E and HCoV-NL63. Important animal alphacoronaviruses are transmissible gastroenteritis virus of pigs and feline infectious peritonitis virus.

[0004] Severe acute respiratory syndrome coronavirus 2 (SARS-CoV-2, also known as 2019-nCoV and HCoV-19) is a novel lineage B betacoronavirus (Beta-CoV) and causes coronavirus disease 2019 (COVID-19), a respiratory illness with high mortality and morbidity resulting in major public health impacts worldwide. Outbreaks of SARS-CoV-2, such as the pandemic starting in 2020, are a paramount challenge for healthcare systems due to the incubation period and transmissibility of the virus. Treatments for COVID-19 are urgently needed, but long-term management of SARS-CoV-2 outbreaks will require an effective vaccine.

[0005] Coronavirus virions are spherical with diameters of approximately 118-140 nm as depicted in recent studies by cryo-electron tomography and cryo-electron microscopy.

[0006] The most prominent structural feature of coronaviruses is the club-shaped spike projections emanating from the surface of the virion. Coronavirus particles consist of a helical nucleocapsid structure, formed by the association between nucleocapsid (N) phosphoproteins and the viral genomic RNA, surrounded by a lipid bilayer where three or four types of structural proteins are inserted: the spike (S), the membrane (M), and the envelope (E) proteins and, for some coronaviruses only, the hemagglutinin-esterase (HE) protein (Masters PS. The molecular biology of coronaviruses. Adv Virus Res. 2006; 66:193-292.)

[0007] The membrane (M) protein is the most abundant structural protein in the virion. It is a small (˜25-30 kDa) protein with three transmembrane domains and is thought to give the virion its shape. The envelope (E) protein is a short, integral membrane protein of 76-109 amino acids, ranging from 8.4 to 12 kDa in size. The primary and secondary structure reveals that E has a short, hydrophilic amino terminus consisting of 7-12 amino acids, followed by a large hydrophobic transmembrane domain (TMD) of 25 amino acids, and ends with a long, hydrophilic carboxyl terminus, which comprises the majority of the protein. The E protein is involved in several aspects of the virus' life cycle, such as assembly, budding, envelope formation, and pathogenesis.

[0008] The spike (S) protein is a glycoprotein that is required for the recognition of host receptors for many coronaviruses as well as the fusion of viral and host cell membranes for viral entry into cells (Belouzard et al., Viruses 2012 June; 4(6):1011-33). As the primary glycoprotein on the surface of the viral envelope, S proteins of Coronaviridae are a major target of neutralizing antibodies elicited by natural infection, including SARS-CoV-2 infection, and are key antigens targeted in experimental vaccine candidates.

[0009] SARS-CoV-2 S protein, like S protein of other coronaviruses, is initially synthesized as a precursor protein. Individual precursor S protein forms a homotrimer and undergoes glycosylation within the Golgi compartment as well as processing to remove the signal peptide. The S protein requires a two-step, protease-mediated activation to facilitate membrane fusion. SARS-CoV-2 S protein is distinguished by a RRAR furin cleavage site at the S1/S2 junction that is presumably processed in the Golgi compartment to yield two separate polypeptides: the S1 and S2 polypeptide (or subunit), which remain non-covalently bound as S1/S2 protomers within the homotrimer in the prefusion conformation (Walls et al. Cell 2020 181(2) p 281-292; Li et al. eLife 2019; 8: e51230.). Furin cleavage at the S1/S2 junction and cleavage at the S2′ site, upstream of the fusion peptide, occurs during viral entry at the cell surface or in endosomes and can be mediated by several proteases.

[0010] This trimer is held in the prefusion conformation prior to binding to target receptors on a host cell via receptor binding domain (RBD) epitopes. Receptor binding destabilizes the prefusion trimer, resulting in shedding of the S1 subunit and transition of the S2 subunit to a stable post-fusion conformation through fusion of the virus to the cell membrane (Wrapp et al. Science, 13 Mar. 2020, Vol. 367, Issue 6483, pp. 1260-1263). Neutralizing antibodies from individuals infected with SARS-CoV-2 have been shown to target the RBD of the S1 subunit of the S protein (Premkumar, L., 2020 Science Immunology 11 Jun. 2020: Vol. 5, Issue 48).

[0011] Stabilization of the S protein ectodomain in the prefusion conformation tends to increase the recombinant expression yield, possibly by preventing triggering or misfolding that results from a tendency to adopt the more stable post-fusion structure (Hsieh et al. Science 2020, 369 p. 1501-1505).

[0012] Mutations to the S protein ectodomain have been shown to facilitate stabilization of the prefusion conformation. WO 2018/081318 and its companion publication by Pallesen, J. et al. (PNAS Aug. 29, 2017 114 (35)) disclose double proline substitutions at or near a junction between a heptad repeat 1 (HR1) and a central helix that stabilize the S ectodomain trimer of MERS-CoV spike protein in a prefusion conformation and substitutions to prevent protease cleavage at a S1/S2 cleavage site and the S2′ cleavage site of the S ectodomain. SARS-CoV-2 S protein stabilized with double proline substitutions at homologous amino acid residues have been used to determine high-resolution structures by cryo-EM (Wrapp et al Science 2020 367, 1260-1263; Walls et al. Cell 2020, 181, 281-292). Further, disruption of the furin recognition site is thought to retain S protein in a prefusion conformation (Wrapp et al Science 2020 367, 1260-1263). However, even with these substitutions, the SARS-CoV-2 S protein ectodomain remains unstable and difficult to produce reliably in mammalian cells, hindering development of effective and high-yield subunit vaccines (Hsieh et al. Science 2020, 369 p. 1501-1505).

[0013] Hsieh et al. (Science 2020, 369 p. 1501-1505) designed and expressed in mammalian cells over 100 structure-guided SARS-CoV-2 spike protein variants based upon previously determined cryo-EM structure. The variants were biochemically, biophysically and structurally characterized to identify substitutions that lead to an increase in yield and stability. Hsieh et al. reports multiple prolines, disulfide bonds, salt bridges, and cavity-filling substitutions that increase expression and/or stability of the spike relative to the double proline substitutions. The best identified variant, HexaPro, has six beneficial proline substitutions leading to 10-fold higher expression than its parental construct and is able to withstand heat stress, storage at room temperature, and multiple freeze-thaws.

[0014] The S2 subunit can be divided into three domains: a large ectodomain, a transmembrane domain (TM) and a cytoplasmic tail (CT). The cytoplasmic tail of the S protein has previously been shown to be required for assembly. Two distinct retention signals may be found in the CT of Coronaviridae: i) an endoplasmic reticulum retrieval signal (ERRS) and/or ii) a tyrosine-dependent localization signal (YxxI or YxxF motif). The ERRS comprises the dibasic KxHxx motif which binds to the coatomer complex I (COPI). The motif is required for the localization of the SARS S protein to the ERGIC/Golgi region when coexpressed with SARS membrane (M) protein, and localization can be disrupted by mutating the KxHxx motif (McBride et al. J. Virol. February 2007, 81 (5) 2418-2428). S proteins containing an ERRS are recruited into COPI vesicles and retrieved from the Golgi to the endoplasmic reticulum (ER) in retrograde. The repeated cycling of S proteins between the ER and the Golgi leads to S protein intracellular retention. S protein of Alphacoronavirus and Betacoronavirus both comprise an ERRS (Ujike et al. Journal of General Virology (2016), 97, 1853-1864).

[0015] S protein of Betacoronavirus, such as S protein of MERS-CoV, SARS-CoV and SARS-CoV 2, possess only an ERRS and cannot be retained intracellularly, resulting in the release of S protein into the plasma membrane. Mutant SARS-CoV S protein lacking the ERRS is transported to the plasma membrane, while native S protein, when coexpressed with M protein, interacts with the M protein near the budding site, leading to S protein intracellular retention, suggesting that the ERRS of SARS-CoV contributes to S protein accumulation specifically in the post-medial Golgi compartment by interaction with M protein, leading to S protein incorporation into VLPs (Ujike et al. Journal of General Virology (2016), 97, 1853-1864). Removal of the ERRS has recently been found to facilitate incorporation of SARS-CoV-2 S protein into lentiviral pseudovirons (Ou et al., 2020 Nature Communications volume 11, Article number: 1620).

[0016] Yu et al. (2020 Science) constructed a set of prototype DNA vaccines expressing six variants of the SARS-CoV-2 S protein with various deletions of the cytoplasmic tail, and transmembrane domain, which were assessed for their immunogenicity and protective efficacy against SARS-CoV-2 viral challenge in rhesus macaques. While the soluble fragments of the SARS-CoV-2 S protein ectodomain elicited reduced levels of sgmRNA (indicative of viral replication), optimal protection was achieved with the full-length S protein immunogen.

[0017] Broer et al. (2006 J. Virol. p. 1302-1310) studied the roles of the transmembrane and cytoplasmic domains of the S protein in the infectivity and membrane fusion activity of SARS-CoV, using a SARS-CoV S-pseudotyped retrovirus (SARSpp). SARSpp, in which the cytoplasmic domain of S was replaced by the cytoplasmic domain derived from vesicular stomatitis virus G protein (VSV-G), were infectious, up to 40% of wild type. In contrast, SARSpp containing both the TMD and the cytoplasmic domain of VSV-G, were severely impaired in infectivity (<5%). This shows that the TMD of S may be involved in the entry process of SARS-CoV.

[0018] Vaccination provides protection against disease by inducing a subject to mount an immune response to a likely agent prior to infection. Conventionally, this has been accomplished through the use of live attenuated or whole inactivated forms of the infectious agents as immunogens. To avoid the danger of using a whole virus (such as killed or attenuated viruses) as a vaccine, viral proteins or subunits, or recombinant versions thereof, have been pursued as vaccines. A major obstacle to employing viral proteins, either native or recombinant, as vaccine agents is ensuring that the conformation of the protein mimics the antigens in their natural environment. Suitable adjuvants and, in the case of peptides, carrier proteins, may be used to boost the immune response. In addition, viral proteins or subunits as vaccines may elicit primarily humoral responses and thus fail to evoke lasting immunity. Subunit vaccines may be ineffective for diseases in which whole inactivated virus can be demonstrated to provide superior protection.

[0019] Virus-like particles (VLPs) may be used in immunogenic compositions to express viral proteins in a preferred conformation with improved antigen presentation to the immune system. VLPs closely resemble mature virions, but they do not contain viral genomic material, and they are non-replicative which makes them safe for administration as a vaccine. In addition, VLPs can be engineered to express viral glycoproteins on the surface of the VLP, which is their native physiological configuration. Since VLPs resemble intact virions and are multivalent particulate structures, VLPs may be more effective in inducing neutralizing antibodies to the glycoprotein than soluble envelope protein antigens.

[0020] A variety of expression systems have been utilized to produce VLPs, including mammalian cell lines, bacteria, insect cell lines, yeast and plant cells. VLPs for over thirty different viruses have been generated in insect and mammalian systems for vaccine purposes (Noad, R. and Roy, P., 2003, Trends Microbiol 11: 438-44). VLPs have also been produced in plants (see WO2009/076778; WO2009/009876; WO 2009/076778; WO 2010/003225; WO 2010/003235; WO2010/006452; WO2011/03522; WO 2010/148511; WO2014153674, and WO2012/083445).

[0021] VLPs have been produced with native surface proteins from Severe acute respiratory syndrome coronavirus (SARS-CoV or SARS-CoV-1), including S protein, M protein, E protein in insect and mammalian cells (Liu et al., 2008, J Virol., p. 11318-11330). SARS-CoV-2 virus like particles (VLPs) have also been assembled by co-expressing viral surface proteins S, M, and E in mammalian cells (Xu et al. Front. Bioeng. Biotechnol., 30 Jul. 2020). Studies have further shown that the M protein is indispensable for virus-like particle (VLP) formation (Siu et al. Journal of Virology (2008) 82:11318-11330, Huang et al. Journal of Virology (2004) 78:12557-12565). In mammalian cells, expression of membrane protein (M) and small envelope protein (E) are essential for efficient formation and release of SARS-CoV-2 VLPs (Xu et al. Front. Bioeng. Biotechnol., 30 Jul. 2020)). Nevertheless, the minimal requirement for assembly of SARS-CoV VLPs is still controversial. Y. Huang et al. (Journal of Virology (2004) 78:12557-12565) described formation of VLPs in transfected human cells that only required co-expression of the M and N viral proteins, whereas Siu et al. (Journal of Virology (2008) 82:11318-11330) showed that both E and N proteins must be coexpressed with M protein for the efficient production and release of SARS-CoV VLPs in transfected mammalian cells.

[0022] WO2012/083445 discloses the production of SARS CoV S protein in plants, wherein the transmembrane domain and the cytosolic tail domain (TM/CT) of the S protein were replaced with TM/CT from an influenza HA protein.

[0023] A few groups have proposed immunization with SARS-CoV VLPs as an effective vaccine strategy. VLPs produced in insect cells or chimeric MHV/SARS-CoV VLPs produced in mammalian cells were used in these studies (Lokugamage et al. Vaccine 2008 Feb. 6; 26(6):797-808, Lu et al. 2007 Immunology 122496-5024).

[0024] However, effective scale-up and manufacture of SARS-CoV-2 VLPs at the quantity required to meet the need of widespread vaccination of the global population, requires efficient viral structural protein and VLP production.

### SUMMARY OF THE INVENTION

[0025] The present invention relates to modified viral structural proteins. The present invention also relates to virus-like particles (VLPs) comprising modified viral structural protein and methods of producing the VLPs in a host or host cells. More specifically, the invention relates to modified coronavirus S proteins. The present invention also relates to virus-like particles (VLPs) comprising modified S proteins and methods of producing the VLPs in a host or host cells.

[0026] In one aspect it is provided a modified coronavirus S-protein comprising, in series,
[0027] an ectodomain derived from a coronavirus S-protein,
[0028] a transmembrane and cytosolic tail domain (TMCT), wherein the TMCT is a chimeric TMCT, comprising:
   [0029] a transmembrane domain (TM), wherein the TM or a portion of the TM is derived from a coronavirus S-protein, and
   [0030] a cytosolic tail (CT), wherein the CT or a portion of the CT is derived from an influenza hemagglutinin (HA) protein.

[0031] The modified S-protein as described herein may form trimers. Accordingly it is also provided a trimer comprising modified coronavirus S-protein as described herewith.

[0032] In a further aspect, a virus like particle (VLP) comprising the modified S-protein or trimers comprising the modified S-protein as described above is provided. Accordingly, the VLP comprises a modified coronavirus S-protein or trimer that comprise the modified S-protein, the modified S-protein comprising
[0033] an ectodomain derived from a coronavirus S-protein,
[0034] a transmembrane and cytosolic tail domain (TMCT), wherein the TMCT is a chimeric TMCT, comprising:
   [0035] a transmembrane domain (TM), wherein the TM or a portion of the TM is derived from a coronavirus S-protein and
   [0036] a cytosolic tail (CT), wherein the CT or a portion of the CT is derived from an influenza hemagglutinin (HA) protein.

[0037] The VLP may further comprise plant lipids.

[0038] The TM may be directly fused to the CT. The TM may be derived from the coronavirus S-protein TM and the CT may be derived from the influenza HA protein CT. Furthermore, the TM may be a chimeric TM comprising a N terminal sequence derived from the coronavirus S-protein TM and a C terminal sequence derived from the influenza HA protein TM. The chimeric TM may comprise a N terminal sequence derived from the coronavirus S-protein TM comprising at least 20 amino acids corresponding to amino acids 1-20 of SEQ ID NO: 18 or SEQ ID NO: 169, or at least 21 amino acids corresponding to amino acids 1-21 of SEQ ID NO: 118 or 164, or at least 22 amino acids corresponding to amino acids 1-22 of SEQ ID NO: 123 and one or more than one amino acid from the C-terminal end of the influenza HA protein TM. The one or more than one amino acid from the C-terminal end of the influenza HA protein TM may be selected from AGL or conserved substitution of AGL, MAGL or conserved substitution of MAGL. The chimeric TM may comprise amino acids corresponding to amino acids of 1-20 of SEQ ID NO: 18.

[0039] The CT may be chimeric CT comprising a N terminal sequence derived from the coronavirus S-protein CT and a C terminal sequence derived from the influenza HA protein CT. The chimeric CT may comprise a C terminal sequence derived from influenza HA protein CT comprising at least 11 amino acids corresponding to amino acids 27-37 of SEQ ID NO: 18, 126, 127, 128, 129, 130 or 131 and one or more than one amino acid from the N-terminal end of the coronavirus S-protein CT. The one or more than one amino acid from the N-terminal end of the coronavirus S-protein CT may be selected from C or a conserved substitution of C, CC or a conserved substitution of CC, or CCM or a or a conserved substitution of CCM. The chimeric CT may comprise amino acids corresponding to amino acids of 27-37 of SEQ ID NO: 18, 126, 128, 129, 130 or 131; or amino acids 27-36 of SEQ ID NO: 127. In one aspect the chimeric TMCT may comprise a chimeric TM comprising amino acids corresponding to amino acids 1-20 of SEQ ID NO: 18 or SEQ ID NO: 169, or to amino acids 1-21 of SEQ ID NO: 118 or SEQ ID NO: 164, or amino acids 1-22 of SEQ ID NO: 123, a chimeric CT comprising amino acids corresponding to amino acids 27-37 of SEQ ID NO: 18, 126, 127, 128, 129, 130 or 131, or a combination thereof.

[0040] The CT or portion of the CT may comprise from 80% to 100% identity with the sequence of SEQ ID NO: 15, or with amino acids 35-50 of SEQ ID NO 6, 8, 7, 9, 10, 12, 13 or 14, or with amino acids 34-49 of SEQ ID NO 11, or with amino acids 553-568 of SEQ ID NO:3 or with amino acids 22-37 of SEQ ID NO:18, or with amino acids 21-40 of SEQ ID NO: 19, or with amino acids 21-39 of SEQ ID NO: 37, or with amino acids 25-36 of SEQ ID NO: 38 or with amino acids 24-34 of SEQ ID NO: 39, or amino acids 22-37 of SEQ ID NO: 126, 128, 129, 130 or 131; or amino acids 22-36 of SEQ ID NO: 127. The TM or portion of the TM may comprises from 80% to 100% identity with the sequence of SEQ ID NO: 132 or 133.

[0041] The TMCT may comprise a sequence having about 80% to about 100% identity with the sequence of SEQ ID NO: 18, 19, 37, 38, 39, 64, 126, 127, 128, 129, 130, 131, 118, 119, 120, 123, 124, 125, 134, 135 164, 165, 166, 169, 170, 171, 172 or 173.

[0042] The modified S protein may comprises an S1 subunit and an S2 subunit, wherein the S2 subunit comprises the chimeric TMCT.

[0043] The modified S-protein may be produced as a precursor protein, the precursor protein comprising the modified S-protein and a signal peptide. The precursor protein comprising the modified S-protein and a signal peptide may comprise from 80% to 100% identity with amino acids 1-1234 of SEQ ID 1, or with amino acids 1-1234 of SEQ ID NO: 5, amino acids 1-1219 of SEQ ID NO: 21 or with amino acids 1-1243 of SEQ ID NO: 30 and wherein the amino acid sequence of the CT comprises from 80% to 100% identity with the sequence of SEQ ID NO: 15, or with amino acids 35-50 of SEQ ID NO 6, 8, 7, 9, 10, 12, 13 or 14, or with amino acids 34-49 of SEQ ID NO 11, or with amino acids 553-568 of SEQ ID NO:3.

[0044] The signal peptide may be native or non-native to the S-protein. The non-native signal peptide may be derived from the signal peptide of protein disulfide-isomerase (PDI). The modified S-protein may further comprise plant specific N-glycans.

[0045] The CT or portion of the CT in the modified S-protein may be derived from an influenza hemagglutinin (HA) protein that is derived from influenza type B or influenza subtype H1, H2, H3, H4, H5, H6, H7, H8, H9, H10, H11, H12, H13, H14, H15, or H16. The influenza hemagglutinin (HA) protein may be derived from influenza type B or influenza subtype H1, H3, H5, H6, H7 or H9.

[0046] The ectodomain of the modified S-protein may be derived from SARS-CoV-2, SARS-CoV-1, MERS-CoV, OC43-CoV or 229E-CoV, the TM or the portion of the TM may be derived from SARS-CoV-2, SARS-CoV-1, MERS-CoV, OC43-CoV or 229E-CoV, or both the ectodomain and the TM or the portion of the TM may be derived from SARS-CoV-2, SARS-CoV-1, MERS-CoV, OC43-CoV or 229E-CoV.

[0047] In a further aspect, the modified S-protein may comprise one or more than one amino acid substitution when compared to a wild-type coronavirus amino acid sequence. The one or more than one substitution may maintain the S-protein in a pre-fusion state.

[0048] The one or more than one amino acid substitution may comprise i) substitutions that restricts the processing at a cleavage site between S1 and S2 subunit, ii) substitution of one or more than one amino acid to one or more than one proline, or iii) substitutions that restrict the processing at the cleavage site between the S1 and the S2 subunit and substitution of one or more than one amino acid to one or more than one proline.

[0049] The one or more than one substitution may maintain the S-protein in a pre-fusion state or produces are higher yield of the modified S-protein when expressed in a host or host cell, when compared to the yield of a corresponding S-protein without the one or more than one substitutions expressed in the host or host cell.

[0050] The one or more than one amino acid substitution may correspond to amino acids at positions 667, 668, 670, 802, 923, 927, 971, 972 or a combination thereof, when compared to reference amino acid sequence of SEQ ID NO: 2.

[0051] In one aspect, the one or more than one amino acid substitution correspond to amino acids at positions 971 and 972, when compared to reference amino acid sequence of SEQ ID NO: 2. In another aspect, the one or more than one amino acid substitution correspond to amino acids at positions 802, 927, 971 and 972, when compared to reference amino acid sequence of SEQ ID NO: 2. Furthermore, the modified S-protein may comprise one or more than one amino acid substitution corresponding to amino acids at positions 667, 668, 670, or a combination thereof, when compared to reference amino acid sequence of SEQ ID NO: 2. Accordingly, the modified S-protein may comprise substitutions that correspond to amino acids at positions 667, 668 and 670, when compared to reference amino acid sequence of SEQ ID NO: 2.

[0052] In one aspect, the one or more than one substitution may correspond to amino acids at positions 667, 668, 670, 971 and 972, when compared to reference amino acid sequence of SEQ ID NO: 2. The substitution of the amino acid corresponding to the amino acid at position 667 of SEQ ID NO: 2 may be to glycine or a conserved substitution of glycine, the substitution of the amino acid corresponding to position 668 of SEQ ID NO: 2 may be to a serine or a conserved substitution of serine, the substitution of the amino acid corresponding to position 670 of SEQ ID NO: 2 may be to a serine or a conserved substitution of serine, the substitution of the amino acid corresponding to the amino acid at position 971 of SEQ ID NO: 2 may be to a proline or a conserved substitution of proline and the substitution of the amino acid corresponding to the amino acid at position 972 of SEQ ID NO: 2 may be to a proline or a conserved substitution of proline. The modified S-protein as described above may further comprises an amino acid substitution corresponding to amino acid at position 923, when compared to reference amino acid sequence of SEQ ID NO: 2.

[0053] In another aspect the one or more than one amino acid substitution may correspond to amino acids at positions 667, 668, 670, 802, 927, 971 and 972, when compared to reference amino acid sequence of SEQ ID NO: 2. The substitution of the amino acid corresponding to the amino acid at position 667 of SEQ ID NO: 2 may be to glycine or a conserved substitution of glycine, the substitution of the amino acid corresponding to position 668 of SEQ ID NO: 2 may be to a serine or a conserved substitution of serine, the substitution of the amino acid corresponding to position 670 of SEQ ID NO: 2 may be to a serine or a conserved substitution of serine, the substitution of the amino acid corresponding to the amino acid at positions 802 of SEQ ID NO: 2 may be to a proline or a conserved substitution of proline, the substitution of the amino acid corresponding to the amino acid at positions 927 of SEQ ID NO: 2 may be to a proline or a conserved substitution of proline, the substitution of the amino acid corresponding to the amino acid at positions 971 of SEQ ID NO: 2 may be to a proline or a conserved substitution of proline and the substitution of the amino acid corresponding to the amino acid at positions 972 of SEQ ID NO: 2 may be to a proline or a conserved substitution of proline.

[0054] In another aspect the modified S-protein as described above may further comprises an amino acid substitution corresponding to amino acid at position 923, when compared to reference amino acid sequence of SEQ ID NO: 2. The substitution in the modified S-protein of the amino acid corresponding to the amino acid at position 667 of SEQ ID NO: 2 may be to glycine or a conserved substitution of glycine, the substitution of the amino acid corresponding to position 668 of SEQ ID NO: 2 may be to a serine or a conserved substitution of serine, the substitution of the amino acid corresponding to position 670 of SEQ ID NO: 2 may be to a serine or a conserved substitution of serine, the substitution of the amino acid corresponding to the amino acid at positions 802, 927, 971 and 972 of SEQ ID NO: 2 may be to a proline or a conserved substitution of proline and the substitution of the amino acid corresponding to position 923 of SEQ ID NO: 2 may be to phenylalanine or a conserved substitution of phenylalanine.

[0055] The modified the S-protein may comprise from 80% to 100% identity with amino acids of SEQ ID NO: 5, 21, 30, 47, 48, 49, 50, 51, 52, 53, 54, 55, 56, 57, 58, 59, 60, 61, 62, 95, 96, 97, 108, 109, 110, 144, 145, 146, 155, 156 or 157, or with amino acids 24-1259 of SEQ ID NO: 47 amino acids 25-1259 of SEQ ID NO: 48, amino acids 25-1259 of SEQ ID NO: 49, amino acids 25-1259 of SEQ ID NO: 50, amino acids 25-1259 of SEQ ID NO: 51, amino acids 25-1259 of SEQ ID NO: 52, amino acids 25-1259 of SEQ ID NO: 53, amino acids 25-1259 of SEQ ID NO: 54, amino acids 25-1259 of SEQ ID NO: 55, amino acids 25-1259 of SEQ ID NO: 56, amino acids 25-1259 of SEQ ID NO: 57, amino acids 25-1259 of SEQ ID NO: 58, amino acids 25-1262 of SEQ ID NO: 59, amino acids 25-1261 of SEQ ID NO: 60, amino acids 25-1258 of SEQ ID NO: 61, or amino acids 25-1256 of SEQ ID NO: 62, amino acids 25-1243 of SEQ ID NO: 95, amino acids 25-1240 of SEQ ID NO: 96, amino acids 25-1243 of SEQ ID NO: 97, amino acids 25-1341 of SEQ ID NO: 108, amino acids 25-1338 of SEQ ID NO: 109, amino acids 25-1341 of SEQ ID NO: 110, amino acids 25-1351 of SEQ ID NO: 144, amino acids 25-1348 of SEQ ID NO: 145, amino acids 25-1351 of SEQ ID NO: 146, amino acids 25-1159 of SEQ ID NO: 155, amino acids 25-1156 of SEQ ID NO: 156, or amino acids 25-1159 of SEQ ID NO: 157.

[0056] In another aspect, it is provided a nucleic acid that comprises a nucleotide sequence that encodes the modified S-protein as described above.

[0057] In a further aspect a composition comprising an effective dose of the modified S-protein, the trimer comprising the modified S-protein or VLP comprising the modified S-protein as described above and a pharmaceutically acceptable carrier, adjuvant, vehicle or excipient is provided. In yet another aspect, it is provided a vaccine for inducing an immune response. The vaccine comprises an effective dose of the modified S protein, the trimer comprising the modified S-protein or VLP comprising the modified S-protein as described above as described above.

[0058] The composition further comprises a pharmaceutically acceptable carrier, adjuvant, vehicle or excipient. In a further aspect, it is provided a vaccine for inducing an immune response. The vaccine comprises an effective dose of the VLP comprising a modified coronavirus as described above. The vaccine may be a multivalent vaccine, comprising a mixture of VLP.

[0059] In yet another aspect a (non-human) host or host cell comprising the modified S-protein, trimer or VLP as described above is provided. In yet another aspect a host or host cell comprising the VLP as described above is provided. In another aspect it is provided a composition comprising an effective dose of the VLP comprising the modified S-protein as described above is provided.

[0060] In yet another aspect, a S-protein trimer is provided. The trimer comprises modified coronavirus S-protein, the modified S-protein comprising
[0061] an ectodomain derived from a coronavirus S-protein,
[0062] a transmembrane and cytosolic tail domain (TMCT), wherein the TMCT is a chimeric TMCT, comprising:
[0063] a transmembrane domain (TM), wherein the TM or a portion of the TM is derived from a coronavirus S-protein, and
[0064] a cytosolic tail (CT), wherein the CT or a portion of the CT is derived from an influenza hemagglutinin (HA) protein. The modified S-protein in the trimer may comprise one or more than one amino acid substitution when compared to a wild-type coronavirus amino acid sequence, as described above. In a further aspect a composition comprising an effective dose of the trimer as described above and a pharmaceutically acceptable carrier, adjuvant, vehicle or excipient is provided. In another aspect, virus like particle (VLP) comprising the trimer as described above are also provided. The VLP may further comprise plant lipids. In another aspect it is provided a composition comprising an effective dose of the VLP comprising the trimer as described above and a pharmaceutically acceptable carrier, adjuvant, vehicle or excipient is provided. In a further aspect, it is provided a vaccine for inducing an immune response. The vaccine comprises an effective dose of the trimer as described above. In a further aspect, it is provided a vaccine for inducing an immune response. The vaccine comprises an effective dose of the VLP comprising the trimer as described above. The vaccine may be a multivalent vaccine, comprising a mixture of VLP. In yet another aspect a non-human host or host cell comprising the trimer or the VLP comprising the trimer as described above is provided.

[0065] In another aspect, it is provided a method for inducing immunity to a Coronavirus infection in a subject, the method comprising administering the composition or vaccines as described above. The composition or vaccine may be administered once to the subject or the composition or vaccine may be administered multiple times to the subject. The composition or vaccine may be administered as an initial dose and one or more than one subsequent doses may be administered between 1 day and 6 month from the administration of the initial dose. The subsequent dose may be administered after 21 days from the administration of the initial dose.

[0066] In another aspect an antibody or antibody fragment prepared using the composition or vaccine as described above are provided.

[0067] In yet another aspect, it is provided A) a method of producing a virus like particle (VLP) in a (non-human) host or host cell comprising:
[0068] a) introducing into a non-human host or host cell the nucleic acid comprising a nucleotide sequence that encodes the modified S-protein as described above; or providing the non-human host or host cell comprising the nucleic acid comprising a nucleotide sequence that encodes the modified S-protein as described above, and
[0069] b) incubating the non-human host or host cell under conditions that permit the expression of the nucleic acid, thereby producing the VLP.

[0070] In a further step c) the non-human host or host cell may be harvested.

[0071] In a further aspect, it is provided B) a method of increasing yield of production of a Coronavirus S-protein in a (non-human) host or host cell comprising:
[0072] a) introducing the nucleic acid comprising a nucleotide sequence that encodes the modified S-protein as described above into the non-human host or host cell; or providing a non-human host or host cell comprising the nucleic acid comprising a nucleotide sequence that encodes the modified S-protein as described above; and
[0073] b) incubating the non-human host or host cell under conditions that permit expression of the modified S-protein encoded by the nucleic acid, thereby producing modified S-protein at a higher yield compared to a host or host cell expressing the unmodified S-protein under similar or identical conditions.

[0074] In a further step c) the non-human host or host cell may be harvested.

[0075] In yet another aspect, it is provided C) a method of increasing yield of production of virus like particle (VLP) in a (non-human) host or host cell comprising:
[0076] a) introducing into the non-human host or host cell, a nucleic acid encoding a modified coronavirus S-protein comprising
   [0077] an ectodomain derived from a coronavirus S-protein,
   [0078] a transmembrane and cytosolic tail domain (TMCT), wherein the TMCT is a chimeric TMCT, comprising:
      [0079] a transmembrane domain (TM), wherein the TM or a portion of the TM is derived from a coronavirus S-protein and
      [0080] a cytosolic tail (CT), wherein the CT or a portion of the CT is derived from an influenza hemagglutinin (HA) protein;
[0081] providing a non-human host or host cell comprising the nucleic acid encoding the modified S-protein comprising
   [0082] an ectodomain derived from a coronavirus S-protein,
   [0083] a transmembrane and cytosolic tail domain (TMCT), wherein the TMCT is a chimeric TMCT, comprising:
      [0084] a transmembrane domain (TM), wherein the TM or a portion of the TM is derived from a coronavirus S-protein and
      [0085] a cytosolic tail (CT), wherein the CT or a portion of the CT is derived from an influenza hemagglutinin (HA) protein; and
[0086] b) incubating the non-human host or host cell under conditions that permit expression of the modified S-protein encoded by the nucleic acid, thereby producing VLP comprising modified S-protein at a higher yield compared to the yield of VLP in a host of host cell that expresses unmodified S protein under similar or identical conditions.

[0087] In a further aspect, it is provided D) a method of producing a virus like particle (VLP) in a (non-human) host or host cell comprising:
[0088] a) introducing into a non-human host or host cell, a nucleic acid encoding a modified coronavirus S-protein comprising
   [0089] an ectodomain derived from a coronavirus S-protein,
   [0090] a transmembrane and cytosolic tail domain (TMCT), wherein the TMCT is a chimeric TMCT, comprising:
      [0091] a transmembrane domain (TM), wherein the TM or a portion of the TM is derived from a coronavirus S-protein and
      [0092] a cytosolic tail (CT), wherein the CT or a portion of the CT is derived from an influenza hemagglutinin (HA) protein; or
[0093] providing a non-human host or host cell comprising the nucleic acid encoding the modified S-protein comprising
   [0094] an ectodomain derived from a coronavirus S-protein,
   [0095] a transmembrane and cytosolic tail domain (TMCT), wherein the TMCT is a chimeric TMCT, comprising:
      [0096] a transmembrane domain (TM), wherein the TM or a portion of the TM is derived from a coronavirus S-protein and
      [0097] a cytosolic tail (CT), wherein the CT or a portion of the CT is derived from an influenza hemagglutinin (HA) protein; and
[0098] b) incubating the non-human host or host cell under conditions that permit the expression of the nucleic acid, thereby producing the VLP.

[0099] In a further aspect the VLP of method A), B), C) or D) may further be extracted and purified from the host or host cell. The host or host cell may comprise a plant, a plant cell, a fungi, a fungi cell, an insect, an insect cell, an animal or an animal cell. The host or host cell of method A), B), C) or D) may be a plant, portion of a plant or plant cell.

[0100] In another aspect it is provided a VLP produced by the method of A), B), C) or D).

[0101] Furthermore, in yet another aspect it is provided a composition comprising an adjuvant and virus-like particles (VLP), the VLP comprising modified coronavirus S-protein, the modified S-protein comprising
[0102] an ectodomain derived from a coronavirus S-protein,
[0103] a transmembrane and cytosolic tail domain (TMCT), wherein the TMCT is a chimeric TMCT, comprising:
   [0104] a transmembrane domain (TM), wherein the TM or a portion of the TM is derived from a coronavirus S-protein and
   [0105] a cytosolic tail (CT), wherein the CT or a portion of the CT is derived from an influenza hemagglutinin (HA) protein and wherein the modified S-protein further comprises substitutions at positions 667, 668, 670, 971 and 972 when compared to reference amino acid sequence of SEQ ID NO: 2.

[0106] In yet another aspect it is provided a composition comprising virus-like particle (VLP), the VLP comprising modified coronavirus S-protein, the modified S protein comprising
[0107] an ectodomain derived from a coronavirus S-protein,
[0108] a transmembrane and cytosolic tail domain (TMCT), wherein the TMCT is a chimeric TMCT, comprising:
   [0109] a transmembrane domain (TM), wherein the TM or a portion of the TM is derived from a coronavirus S-protein and
   [0110] a cytosolic tail (CT), wherein the CT or a portion of the CT is derived from an influenza hemagglutinin (HA) protein; and wherein the modified S-protein comprises a glycine substitution at position 667, a serine substitution at position 668, a serine substitution at position 670, a proline substitution at position 971 and a proline substitution at position 972, the position corresponding to reference amino acid sequence of SEQ ID NO: 2. The influenza hemagglutinin (HA) protein may be derived from influenza type B or influenza subtype H1, H3, H5, H6, H7 or H9. The composition may further comprise an adjuvant.

[0111] In a further aspect it is provided a composition comprising virus-like particle (VLP), the VLP comprising modified coronavirus S-protein, the modified S protein comprising the sequence of SEQ ID NO: 21. The composition may further comprise an adjuvant.

[0112] This summary of the invention does not necessarily describe all features of the invention.

### BRIEF DESCRIPTION OF THE DRAWINGS

[0113] These and other features of the invention will become more apparent from the following description in which reference is made to the appended drawings wherein:

[0114] FIG. 1 shows a schematic representation of Coronavirus S protein and the location of S1/S2 (aa 685/686) and S2′ cleavage sites. SP: signal peptide (aa 1-15); NTD: N-terminal domain (aa 16-306); RBD: receptor-binding domain (aa 335-527); FP: fusion peptide (aa 816-833); HR1: heptad repeat 1 (aa 908-991); HR2: heptad repeat 2 (aa 1166-1207); TM: transmembrane domain (aa 1214-1234); CT: cytoplasmic tail (aa 1235-1273). The residue numbers (aa) of each region correspond to their positions in the S protein of SARS-CoV-2 (2019-nCoV).

[0115] FIG. 2 shows an alignment of amino acid sequences from exemplary influenza strains. The C-terminal region of the ectodomain, the transmembrane domain TM, and the cytoplasmic tail domain (CT) of hemagglutinin (HA) are shown for H1 A/California/07/2009 (SEQ ID NO: 6), H2 A/Singapore/1/1957 HA (SEQ ID NO:7), H3 A/Minnesota/41/2019 HA (SEQ ID NO:8), H5 A/Indonesia/5/05 HA (SEQ ID NO:9), H6 A/Teal/Hong Kong/W312/97 HA (SEQ ID NO:10), H7 A/Guangdong/17SF003/2016 HA (SEQ ID NO:11), H9 A/Hong Kong/1073/99 HA (SEQ ID NO:12), and B/Washington/02/2019 HA (SEQ ID NO:13). The consensus sequence for these sequences is also shown (SEQ ID NO: 14).

[0116] FIG. 3A shows quantified fold-change difference in SARS-CoV-2 S protein accumulation in plants expressing: SARS-CoV-2 S protein with a native (wild-type) transmembrane domain and cytoplasmic tail (wtTMCT) under the control of the following 5′UTRs: nbMT78 (construct 8586), nbCSY65 (construct 8589) and nbHEL40 (construct 8591); a modified SARS-CoV-2 protein wherein the native (wild-type) transmembrane domain and cytoplasmic tail (wtTMCT) has been replaced with the TMCT of influenza hemagglutinin (HA) of influenza H5 A/Indonesia/5/05 (H5iTMCT) under the control of nbMT78 (construct 8592), nbCSY65 (construct 8595) and nbHEL40 (construct 8597); and a modified SARS-CoV-2 protein wherein the native (wild-type) cytoplasmic tail (wtCT) has been replaced with the CT of influenza hemagglutinin (HA) of influenza H5 A/Indonesia/5/05 (H5iCT) under the control of nbMT78 (construct 8610), nbCSY65 (construct 8611) and nbHEL40 (construct 8671). The SARS-CoV-2 S protein sequences (referred to as nCOV S (GSAS-2P)) have the following substitutions: R667G, R668S, R670S, K971P and V972P with respect to the reference sequence of SEQ ID NO: 2. The results have been normalized to the SARS-CoV-2 S protein accumulation from construct 8591, which is set as 1. FIG. 3B shows protein separation of clarified crude extract on a non-reducing SDS-PAGE gel. The following modified S proteins were expressed in plants: Lane 1: S protein with wild-type transmembrane and cytosolic tail domain (wt TMCT) under the control of nbMT78; lane 2: S protein with wild-type transmembrane and cytosolic tail domain (wt TMCT) under the control of nbCSY65; lane 3: S protein with wild-type transmembrane and cytosolic tail domain (wt TMCT) under the control of nbHEL40; lane 4: modified S protein with a SARS-CoV-2 ectodomain, and a transmembrane and cytosolic tail domain from hemagglutinin (HA) of H5 A/Indonesia/5/05 (H5i TMCT) under the control of nbMT78; lane 5: modified S protein with a SARS-CoV-2 ectodomain and a transmembrane and cytosolic tail domain from hemagglutinin (HA) of H5 A/Indonesia/5/05 (H5i TMCT) under the control of nbCSY65; lane 6: modified S protein with a SARS-CoV-2 ectodomain and a transmembrane and cytosolic tail domain from hemagglutinin (HA) of H5 A/Indonesia/5/05 (H5i TMCT) under the control of nbHEL40; lane 7: modified S protein with a SARS-CoV-2 ectodomain, a SARS-CoV-2 transmembrane domain and cytosolic tail domain (CT) from hemagglutinin (HA) of influenza H5 A/Indonesia/5/05 (H5i CT) under the control of nbMT78; lane 8: modified S protein with a SARS-CoV-2 ectodomain, a SARS-CoV-2 transmembrane domain and cytosolic tail domain (CT) from hemagglutinin (HA) of influenza H5 A/Indonesia/5/05 (H5i CT) under the control of nbCSY65; lane 9: modified S protein with a SARS-CoV-2 ectodomain, a SARS-CoV-2 transmembrane domain and cytosolic tail domain (CT) from hemagglutinin (HA) of influenza H5 A/Indonesia/5/05 (H5i CT) under the control of nbHEL40. The modified S protein has a molecular weight of about 150 kDa and is indicated by an arrow. FIG. 3C shows a Western blot analysis of the same series of lysates depicted in FIG. 3B and the lanes correspond to the lanes as described in FIG. 3B. The top panel shows detection with an anti-SARS-CoV-2 S1 antibody (40150-R007). The bottom panel shows detection with an anti-SARS-CoV-2 S2 antibody (NB100-56578). The monomer of the SARS-CoV-2 protein (comprising the S1 and S2 subunit) has a molecular weight of about 150 kDa (non-reducing).

[0117] FIG. 4A shows quantified fold-change difference in SARS-CoV-2 S protein accumulation in plants expressing: a modified S protein with a SARS-CoV-2 ectodomain, a SARS-CoV-2 transmembrane, and cytosolic tail domain from hemagglutinin (HA) of H5 A/Indonesia/5/05 (H5 Indo); a modified S protein with a SARS-CoV-2 ectodomain, a SARS-CoV-2 transmembrane, and cytosolic tail domain from hemagglutinin (HA) of H1 A/California/7/2009 (H1 California); a modified S protein with a SARS-CoV-2 ectodomain, a SARS-CoV-2 transmembrane, and cytosolic tail domain from hemagglutinin (HA) of H3 A/Minnesota/41/2019 (H3 Minnesota); a modified S protein with a SARS-CoV-2 ectodomain, a SARS-CoV-2 transmembrane, and cytosolic tail domain from hemagglutinin (HA) of H6 A/Teal/Hong Kong/W312/97 (H6 Hong Kong); a modified S protein with a SARS-CoV-2 ectodomain, a SARS-CoV-2 transmembrane, and cytosolic tail domain from hemagglutinin (HA) of H7 A/Guangdong/17SF003/2016 (H7 Guangdong); a modified S protein with a SARS-CoV-2 ectodomain, a SARS-CoV-2 transmembrane, and cytosolic tail domain from hemagglutinin (HA) of H9 A/Hong Kong/1073/99 (H9 Hong Kong); and a modified S protein with a SARS-CoV-2 ectodomain, a SARS-CoV-2 transmembrane, and cytosolic tail domain from hemagglutinin (HA) of B/Washington/02/2019 (B Washington). The results have been normalized to the SARS-CoV-2 S protein accumulation from construct 8671 encoding a modified SARS-CoV-2 protein wherein the native (wild-type) cytoplasmic tail (wtCT) has been replaced with the CT of influenza hemagglutinin (HA) of influenza H5 A/Indonesia/5/05 (H5iCT) under the control of nbHEL40 (H5 Indo), which is set as 1.

[0118] FIG. 4B shows a Western blot analysis of crude lysate from plants expressing the modified S proteins from the following constructs: lane 2, a modified S protein with a SARS-CoV-2 ectodomain, a SARS-CoV-2 transmembrane, and cytosolic tail domain from hemagglutinin (HA) of H5 A/Indonesia/5/05 (H5 Indo); lane 3, a modified S protein with a SARS-CoV-2 ectodomain, a SARS-CoV-2 transmembrane, and cytosolic tail domain from hemagglutinin (HA) of H1 A/California/07/2009 (H1 Calif); lane 4, a modified S protein with a SARS-CoV-2 ectodomain, a SARS-CoV-2 transmembrane, and cytosolic tail domain from hemagglutinin (HA) of H3 A/Minnesota/41/2019 (H3 Minn); lane 5, a modified S protein with a SARS-CoV-2 ectodomain, a SARS-CoV-2 transmembrane, and cytosolic tail domain from hemagglutinin (HA) of H6 A/Teal/Hong Kong/W312/97 (H6 HK); lane 6, a modified S protein with a SARS-CoV-2 ectodomain, a SARS-CoV-2 transmembrane, and cytosolic tail domain from hemagglutinin (HA) of H7 A/Guangdong/17SF003/2016 (H7 Guan); lane 7, a modified S protein with a SARS-CoV-2 ectodomain, a SARS-CoV-2 transmembrane, and cytosolic tail domain from hemagglutinin (HA) of H9 A/Hong Kong/1073/99 (H9 HK); lane 8, a modified S protein with a SARS-CoV-2 ectodomain, a SARS-CoV-2 transmembrane, and cytosolic tail domain from hemagglutinin (HA) of B/Washington/02/2019 (B Wash). Lane 1 is crude lysate from a plant treated with a mock Agroinfiltration. Sino 400150-R007 antibody was used for detection of the S1 subunit of the SARS-COV-2 S protein. The monomer of the SARS-CoV-2 protein (comprising the S1 and S2 subunit) has a molecular weight of about 150 kDa (non-reducing). FIG. 4C shows a Western blot analysis of the same series of lysates depicted in FIG. 4B, except with NB100-56578 antibody detecting the S2 subunit of the SARS-COV-2 S protein.

[0119] FIG. 5A shows the amino acid sequence of the C-terminal region of the native SARS-CoV-2 S protein (wtTM/wtCT), the C-terminal region of influenza H5 hemagglutinin (HA) (H5iTM/H5iCT), the C-terminal region of modified SARS-CoV-2 S protein with wild-type transmembrane domain (TM) and influenza H5 HA cytosolic tail (CT) domain (wtTM/H5iCT), and the C-terminal regions of four alternative versions of modified S protein (wtTM/H5iCT V1-V4) with variable margin between the SARS-CoV-2 transmembrane (TM) domain and H5 A/Indonesia/5/05 HA cytosolic tail (CT) domain. The TM domain from Coronavirus S-protein is underlined and the CT domain derived from influenza HA is shown in bold. FIG. 5B shows quantified fold-change difference in SARS-CoV-2 S protein accumulation in plants expressing each of the four variant modified S proteins with a chimeric transmembrane and cytosolic tail domain (TMCT), as depicted in FIG. 5A (wtTM/H5iCT, V1-V4), relative to modified SARS-CoV-2 S protein accumulation in plants expressing modified SARS-CoV-2 S protein having a chimeric TMCT with a wild-type transmembrane domain (TM) and influenza H5 HA cytosolic tail (CT) domain (wtTM/H5iCT) which is set as 1.

[0120] FIG. 6A shows an electron micrograph of virus like particles (VLP) comprising SARS-COV-2 S protein with wild-type transmembrane and cytosolic tail domain (wtTMCT; construct 8591) FIG. 6B shows an electron micrograph of virus like particles (VLP) comprising a modified S protein with a SARS-CoV-2 ectodomain and an influenza H5 hemagglutinin transmembrane domain and cytosolic tail domain (H5i TMCT; construct 8597). FIG. 6C shows an electron micrograph of virus like particles (VLP) comprising a modified S protein with a SARS-CoV-2 ectodomain, a SARS-CoV-2 transmembrane domain and an influenza H5 hemagglutinin cytosolic tail domain (H5i CT; construct 8671). FIG. 6D shows an electron micrograph of virus like particles (VLP) comprising an alternative version of modified S protein (H5i CT V1; construct 8980) having a SARS-CoV-2 ectodomain and a chimeric transmembrane and cytosolic tail domain (TMCT). FIG. 6E shows an electron micrograph of virus like particles (VLP) comprising an alternative version of modified S protein (H5i CT V2; construct 8981) having a SARS-CoV-2 ectodomain and a chimeric transmembrane and cytosolic tail domain (TMCT). FIG. 6F shows an electron micrograph of virus like particles (VLP) comprising an alternative version of modified S protein (H5i CT V3; construct 8982) with a SARS-CoV-2 ectodomain having a SARS-CoV-2 ectodomain and a chimeric transmembrane and cytosolic tail domain (TMCT). FIG. 6G shows an electron micrograph of virus like particles (VLP) comprising an alternative version of modified S protein (H5i CT V4; construct 8983) having a SARS-CoV-2 ectodomain and a chimeric transmembrane and cytosolic tail domain (TMCT). FIG. 6H shows an electron micrograph of virus like particles (VLP) comprising a modified S protein with a SARS-CoV-2 ectodomain, a SARS-CoV-2 transmembrane domain and an influenza H1 hemagglutinin cytosolic tail domain (H1 CT; construct 7390). FIG. 6I shows an electron micrograph of virus like particles (VLP) comprising a modified S protein with a SARS-CoV-2 ectodomain, a SARS-CoV-2 transmembrane domain and an influenza H3 hemagglutinin cytosolic tail domain (H3 CT; construct 7391). FIG. 6J shows an electron micrograph of virus like particles (VLP) comprising a modified S protein with a SARS-CoV-2 ectodomain, a SARS-CoV-2 transmembrane domain and an influenza H6 hemagglutinin cytosolic tail domain (H6 CT; construct 7392). FIG. 6K shows an electron micrograph of virus like particles (VLP) comprising a modified S protein with a SARS-CoV-2 ectodomain, a SARS-CoV-2 transmembrane domain and an influenza H7 hemagglutinin cytosolic tail domain (H7 CT; construct 7393). FIG. 6L shows an electron micrograph of virus like particles (VLP) comprising a modified S protein with a SARS-CoV-2 ectodomain, a SARS-CoV-2 transmembrane domain and an influenza H9 hemagglutinin cytosolic tail domain (H9 CT; construct 7394). FIG. 6M shows an electron micrograph of virus like particles (VLP) comprising a modified S protein with a SARS-CoV-2 ectodomain, a SARS-CoV-2 transmembrane domain and an influenza HA B hemagglutinin cytosolic tail domain (HA B CT; construct 7395).

[0121] FIG. 7A shows a schematic representation of acceptor vector 8501. FIG. 7B shows a schematic representation of acceptor vector 8500. FIG. 7C shows a schematic representation of acceptor vector 8716.

[0122] FIG. 8A shows a schematic representation of vector 8586. FIG. 8B shows a schematic representation of vector 8589. FIG. 8C shows a schematic representation of vector 8591.

[0123] FIG. 9A shows a schematic representation of vector 8592. FIG. 9B shows a schematic representation of vector 8595. FIG. 9C shows a schematic representation of vector 8597.

[0124] FIG. 10A shows a schematic representation of vector 8610. FIG. 10B shows a schematic representation of vector 8611. FIG. 10C shows a schematic representation of vector 8671.

[0125] FIG. 11A shows quantified fold-change of accumulation in plants expressing modified SARS-CoV-2 S protein (wtTM/H5iCT) with additional substitutions. The modified SARS-CoV-2 S proteins have the following substitutions: “GSAS-2P”: R667G, R668S, R670S, K971P and V972P; “GSAS-4P”: R667G, R668S, R670S, K971P, V972P, F802P and A927P; and “GSAS-6P”: R667G, R668S, R670S, K971P, V972P, F802P, A877P, A884P and A927P (with respect to reference sequence of SEQ ID NO: 2). The results have been normalized to the accumulation of modified SARS-CoV-2 (wtTM/H5iCT) and GSAS+2P substitutions, which is set as 1. FIG. 11B shows quantified fold-change of accumulation in plants expressing modified SARS-CoV-2 S protein (wtTM/H5iCT) with each of the GSAS-2P, GSAS-4P, and GSAS-6P substitutions as described for FIG. 11A as compared to the quantified fold change of accumulation wherein each modified SARS-CoV-2 S protein further incorporates a L923F substitution. The results have been normalized to the accumulation of modified SARS-CoV-2 (wtTM/H5iCT) and GSAS+2P substitutions, which is set as 1.

[0126] FIG. 12A shows a schematic representation of vector 8980. FIG. 12B shows a schematic representation of vector 8981. FIG. 12C shows a schematic representation of vector 8982. FIG. 12D shows a schematic representation of vector 8983.

[0127] FIG. 13A shows a schematic representation of vector 7390. FIG. 13B shows a schematic representation of vector 7391. FIG. 13C shows a schematic representation of vector 7392. FIG. 13D shows a schematic representation of vector 7393. FIG. 13E shows a schematic representation of vector 7394. FIG. 13F shows a schematic representation of vector 7395.

[0128] FIG. 14A shows a schematic representation of vector 8953. FIG. 14B shows a schematic representation of vector 8940.

[0129] FIG. 15A shows a schematic representation of vector 8933. FIG. 15B shows a schematic representation of vector 8960. FIG. 15C shows a schematic representation of vector 8947.

[0130] FIG. 16A shows a Western blot analysis of crude lysate from plants expressing the modified S proteins from the following constructs: lane 1, a modified S protein with a SARS-CoV-1 ectodomain, transmembrane, and cytosolic tail domain (“wtTMCT”, construct 9231); lane 2, a modified S protein with an ectodomain from SARS-CoV-1, and a transmembrane and cytosolic tail domain (TMCT) from hemagglutinin (HA) of H5 A/Indonesia/5/05 (“H5iTMCT”, construct 9232); lane 3, a modified S protein with an ectodomain and transmembrane domain from SARS-CoV-1 and a cytosolic tail domain from hemagglutinin (HA) of H5 A/Indonesia/5/05 (H5 Indo) (“H5iCT”, construct 9233); lane 4, a modified S protein with an ectodomain and transmembrane domain from SARS-CoV-1 and a cytosolic tail domain from hemagglutinin (HA) of H5 A/Indonesia/5/05 (H5 Indo) with a variable margin between the SARS-CoV-1 transmembrane (TM) domain and H5 A/Indonesia/5/05 HA cytosolic tail (CT) domain (“H5iCT(V4)”, construct 9234); lane 5, a modified S protein with an ectodomain and transmembrane domain from a SARS-CoV-1 and a cytosolic tail domain from hemagglutinin (HA) of H1 A/California/7/2009 (“H1cCT”, construct 9235). The primary antibody used for detection was SARS-CoV Spike S1 Subunit Antibody from Sino Biologicals (40150-MM08, 1/5000). The secondary antibody used for detection was Goat anti-Mouse from JIR (115-035-146, 1/10000). The modified S protein has a molecular weight of about 150 kDa.

[0131] FIGS. 16B, 16C and 16D shows Western blot analysis of fractions F5 (30%), F6 (30%), F7 (25%), F8 (25%), F9 (25%), F10 (15%) and F11 (15%) from a discontinuous iodixanol density gradient. Accumulation of protein in these fractions is indicative for the formation of higher molecular weight structures i.e. VLP formation. For Western blots from fractions of crude lysate, the primary antibody used for detection was SARS-CoV Spike S1 subunit antibody from Sino Biologicals, 40150-MM08 (1/5000) and the secondary antibody used for detection was Goat anti-Mouse, JIR, 115-035-146 (1/10000). FIG. 16B: Crude lysate from plants expressing SARS-CoV-1 S protein (with 2P+R667A substitution), with a native TMCT domain (wtTMCT, construct 9231) were analyzed. FIG. 16C: Crude lysate from plants expressing modified SARS-CoV-1 S protein (with 2P+R667A substitution) having a TMCT from H5 A/Indonesia/5/05 HA (H5iTMCT, construct 9232). FIG. 16D: Crude lysate from plants expressing modified SARS-CoV-1 S protein (with 2P+R667A substitution) having a cytoplasmic tail from H5 A/Indonesia/5/05 HA (H5iCT, construct 9233).

[0132] FIG. 17A shows an electron micrograph of virus like particles (VLP) comprising SARS-COV-1 S protein (with 2P+R667A substitution) with native TMCT domain (wtTMCT, construct 9231). FIG. 17B shows an electron micrograph of virus like particles (VLP) comprising modified SARS-CoV-1 S protein (with 2P+R667A substitution) having a TMCT from H5 A/Indonesia/5/05 HA (H5iTMCT, construct 9232). FIG. 17C shows an electron micrograph of virus like particles (VLP) comprising modified SARS-CoV-1 S protein (with 2P+R667A substitution) having a cytoplasmic tail from H5 A/Indonesia/5/05 HA (H5iCT, construct 9233).

[0133] FIG. 18A shows a schematic representation of vector 9231. FIG. 18B shows a schematic representation of vector 9232. FIG. 18C shows a schematic representation of vector 9233. FIG. 18D shows a schematic representation of vector 9234. FIG. 18E shows a schematic representation of vector 9235.

[0134] FIG. 19A shows a Western blot analysis of crude lysate from plants expressing the modified S proteins from the following constructs: lane 1, a modified S protein with a MERS-CoV ectodomain, transmembrane, and cytosolic tail domain (“wtTMCT”, construct 9246); lane 2, a modified S protein with an ectodomain from MERS-CoV, and a transmembrane and cytosolic tail domain (TMCT) from hemagglutinin (HA) of H5 A/Indonesia/5/05 (“H5iTMCT”, construct 9247); lane 3, a modified S protein with an ectodomain and transmembrane domain from MERS-CoV and a cytosolic tail domain from hemagglutinin (HA) of H5 A/Indonesia/5/05 (H5 Indo) (“H5iCT”, construct 9249); lane 4, a modified S protein with an ectodomain and transmembrane domain from MERS-CoV and a cytosolic tail domain from hemagglutinin (HA) of H5 A/Indonesia/5/05 (H5 Indo) with a variable margin between the MERS-CoV transmembrane (TM) domain and H5 A/Indonesia/5/05 HA cytosolic tail (CT) domain (“H5iCT(V4)”, construct 9250); lane 5, a modified S protein with an ectodomain and transmembrane domain from a MERS-CoV and a cytosolic tail domain from hemagglutinin (HA) of H1 A/California/7/2009 (“H1cCT”, construct 9251). The primary antibody used for detection was MERS-CoV spike protein S1 antibody (N-terminal) from Sino Biological, (100208-RP02, 1/5000). The secondary antibody used for detection was Goat anti-Mouse from JIR (115-035-144, 1/10000). The modified S protein has a molecular weight of about 175 kDa. FIG. 19B shows an electron micrograph of virus like particles (VLP) comprising MERS-COV S protein (with ASVG+2P substitution) with native TMCT domain (wtTMCT, construct 9246). FIG. 19C shows an electron micrograph of virus like particles (VLP) comprising modified MERS-CoV S protein (with ASVG+2P substitution) having a TMCT from H5 A/Indonesia/5/05 HA (H5iTMCT, construct 9247). FIG. 19D shows an electron micrograph of virus like particles (VLP) comprising modified MERS-CoV S protein (with ASVG+2P substitution) having a cytoplasmic tail from H5 A/Indonesia/5/05 HA (H5iCT, construct 9249). FIG. 19E shows an electron micrograph of virus like particles (VLP) comprising modified MERS-CoV S protein (with ASVG+2P substitution) having a cytoplasmic tail from H5 A/Indonesia/5/05 HA with a variable margin between the MERS-CoV transmembrane (TM) domain and H5 A/Indonesia/5/05 HA cytosolic tail (CT) domain (H5iCT (V4), construct 9250). FIG. 19F shows an electron micrograph of virus like particles (VLP) comprising modified MERS-CoV S protein (with ASVG+2P substitution) having a cytoplasmic tail from H1 A/California/7/2009 HA (H1cCT, construct 9251).

[0135] FIG. 20A shows a schematic representation of vector 9246. FIG. 20B shows a schematic representation of vector 9247. FIG. 20C shows a schematic representation of vector 9249. FIG. 20D shows a schematic representation of vector 9250. FIG. 20E shows a schematic representation of vector 9251.

[0136] FIG. 21 shows a schematic representation of acceptor vector 7147.

[0137] FIG. 22 shows an alignment of the native SARS-CoV-2, SARS-CoV-1, and MERS-CoV S protein sequences with the native signal peptide removed (SEQ ID NO: 2, 114, and 115). Residues corresponding to the RRAR furin cleavage site (667-670) and each of F802P, A877P, A884P, A927P, K971P, V972P in native SARS-CoV-2 S protein without signal peptide (SEQ ID NO: 2) are boxed along with homologous residues from native SARS-CoV-1 S protein without signal peptide (SEQ ID NO: 114) and native MERS S protein (SEQ ID NO: 115).

[0138] FIG. 23A shows a Western blot analysis of crude lysate from plants expressing the modified S proteins from the following constructs: lane 3, a modified S protein with a OC43-CoV ectodomain, transmembrane, and cytosolic tail domain (“wtTMCT”, construct 9269); lane 4, a modified S protein with an ectodomain from OC43-CoV, and a transmembrane and cytosolic tail domain (TMCT) from hemagglutinin (HA) of H5 A/Indonesia/5/05 (“H5iTMCT”, construct 9270); lane 5, a modified S protein with an ectodomain and transmembrane domain from OC43-CoV and a cytosolic tail domain from hemagglutinin (HA) of H5 A/Indonesia/5/05 (H5 Indo) (“H5iCT”, construct 9272); lane 6, a modified S protein with an ectodomain and transmembrane domain from OC43-CoV and a cytosolic tail domain from hemagglutinin (HA) of H5 A/Indonesia/5/05 (H5 Indo) with a variable margin between the OC43-CoV transmembrane (TM) domain and H5 A/Indonesia/5/05 HA cytosolic tail (CT) domain (“H5iCT (V4)”, construct 9273); lane 7, a modified S protein with an ectodomain and transmembrane domain from a OC43-CoV and a cytosolic tail domain from hemagglutinin (HA) of H1 A/California/7/2009 (“H1cCT”, construct 9274). The primary antibody used for detection was anti-coronavirus OC43 spike protein from Antibodies-online (ABIN2754654, 1/1000. The secondary antibody used for detection was Goat anti-Rabbit from JIR (111-035-144, 1/10000). The modified S protein has a molecular weight of about 150 kDa.

[0139] FIG. 23B shows an electron micrograph of virus like particles (VLP) comprising modified OC43-CoV S protein (with GGSGS+2P substitution) having a TMCT from H5 A/Indonesia/5/05 HA (H5iTMCT, construct 9270). FIG. 23C shows an electron micrograph of virus like particles (VLP) comprising modified OC43-CoV S protein (with GGSGS+2P substitution) having a cytoplasmic tail from H5 A/Indonesia/5/05 HA (H5iCT, construct 9272). FIG. 23D shows an electron micrograph of virus like particles (VLP) comprising modified OC43-CoV S protein (with GGSGS+2P substitution) having a cytoplasmic tail from H5 A/Indonesia/5/05 HA with a variable margin between the OC43-CoV transmembrane (TM) domain and H5 A/Indonesia/5/05 HA cytosolic tail (CT) domain (H5iCT (V4), construct 9273). FIG. 23E shows an electron micrograph of virus like particles (VLP) comprising modified OC43-CoV S protein (with GGSGS+2P substitution) having a cytoplasmic tail from H1 A/California/7/2009 HA (H1cCT, construct 9274).

[0140] FIG. 24A shows a schematic representation of vector 9269. FIG. 24B shows a schematic representation of vector 9270. FIG. 24C shows a schematic representation of vector 9272. FIG. 24D shows a schematic representation of vector 9273. FIG. 24E shows a schematic representation of vector 9274.

[0141] FIG. 25A shows an electron micrograph of virus like particles (VLP) comprising 229E-CoV S protein (with R567A+2P substitution) with native TMCT domain (wtTMCT, construct 9310). FIG. 25B shows an electron micrograph of virus like particles (VLP) comprising modified 229E-CoV S protein (with R567A+2P substitution) having a TMCT from H5 A/Indonesia/5/05 HA (H5iTMCT, construct 9311). FIG. 25C shows an electron micrograph of virus like particles (VLP) comprising modified 229E-CoV S protein (with R567A+2P substitution) having a cytoplasmic tail from H5 A/Indonesia/5/05 HA (H5iCT, construct 9312). FIG. 25D shows an electron micrograph of virus like particles (VLP) comprising modified 229E-CoV S protein (with R567A+2P substitution) having a cytoplasmic tail from H5 A/Indonesia/5/05 HA with a variable margin between the 229E-CoV transmembrane (TM) domain and H5 A/Indonesia/5/05 HA cytosolic tail (CT) domain (H5iCT (V4), construct 9313). FIG. 25E shows an electron micrograph of virus like particles (VLP) comprising modified 229E-CoV S protein (with R567A+2P substitution) having a cytoplasmic tail from H1 A/California/7/2009 HA (H1cCT, construct 9314).

[0142] FIG. 26A shows a schematic representation of vector 9310. FIG. 26B shows a schematic representation of vector 9311. FIG. 26C shows a schematic representation of vector 9312. FIG. 26D shows a schematic representation of vector 9313. FIG. 26E shows a schematic representation of vector 9314.

### DETAILED DESCRIPTION

[0143] The following description is of a preferred embodiment.

[0144] As used herein, the terms “comprising,” “having,” “including” and “containing,” and grammatical variations thereof, are inclusive or open-ended and do not exclude additional, un-recited elements and/or method steps. The term “consisting essentially of” when used herein in connection with a use or method, denotes that additional elements and/or method steps may be present, but that these additions do not materially affect the manner in which the recited method or use functions. The term “consisting of” when used herein in connection with a use or method, excludes the presence of additional elements and/or method steps. A use or method described herein as comprising certain elements and/or steps may also, in certain embodiments, consist essentially of those elements and/or steps, and in other embodiments consist of those elements and/or steps, whether or not these embodiments are specifically referred to. In addition, the use of the singular includes the plural, and “or” means “and/or” unless otherwise stated. The term “plurality” as used herein means more than one, for example, two or more, three or more, four or more, and the like. Unless otherwise defined herein, all technical and scientific terms used herein have the same meaning as commonly understood by one of ordinary skill in the art. As used herein, the term “about” refers to an approximately +/−10% variation from a given value. It is to be understood that such a variation is always included in any given value provided herein, whether or not it is specifically referred to. The use of the word “a” or “an” when used herein in conjunction with the term “comprising” may mean “one,” but it is also consistent with the meaning of “one or more,” “at least one” and “one or more than one.”

[0145] The present description relates to modified viral structural protein and their production in a host or host cell. The modified viral structural protein comprises in series, an ectodomain, a transmembrane domain (TM) or portion of a TM, and a cytosolic tail (CT) domain or portion of a CT, wherein the ectodomain and the TM or portion of the TM are derived from a Coronaviridae, and the CT or portion of the CT is derived from an influenza hemagglutinin (HA) protein.

[0146] The modified viral structural protein may be a modified Coronavirus structural protein, wherein the cytosolic tail domain or portion of the cytosolic tail domain has been replaced with the cytosolic tail domain or portion of the cytosolic tail domain of an influenza hemagglutinin (HA) protein. For example, the modified viral structural protein may be a modified Coronavirus spike or surface (S) protein, wherein the cytosolic tail domain or portion of the cytosolic tail domain of the S protein has been replaced with the cytosolic tail domain or portion of the cytosolic tail domain of an influenza hemagglutinin (HA) protein.

[0147] The present disclosure provides modified viral structural protein, wherein the ectodomain and the transmembrane domain of the modified viral structural protein may be derived from the ectodomain and the transmembrane domain of a Coronavirus S protein and wherein the cytosolic tail domain is derived from the cytosolic tail domain of an influenza hemagglutinin (HA) protein.

[0148] The modified S-protein may be a chimeric modified S-protein or a chimeric S-protein. By “chimeric S-protein”, it is meant a protein or polypeptide that comprises amino acid sequences and/or protein domains or portions of protein domains from two or more than two sources that are fused as a single polypeptide. For example but not limited to, the ectodomain and the transmembrane domain (TM) or portion of the TM of the chimeric S-protein may be derived from a first viral structural protein, for example a Coronavirus S protein, and the cytoplasmic tail (CT) or portion of the CT may be derived from a second viral structural protein, for example the CT may be derived from influenza HA. Furthermore, the ectodomain may be derived from a first viral structural protein for example a first Coronavirus S protein, the TM or portion of the TM may be derived from a second viral structural protein, for example a second Coronavirus S protein and the CT or portion of the CT may be derived from a third viral structural protein, for example the CT may be derived from influenza HA. Accordingly, the modified S-protein or chimeric S-protein may comprise a chimeric transmembrane and cytosolic tail domain (TMCT).

[0149] The modified coronavirus S-protein may comprise, in series,
[0150] an ectodomain derived from a coronavirus S-protein,
[0151] a transmembrane and cytosolic tail domain (TMCT), wherein the TMCT may be a chimeric TMCT, that may comprise:
   [0152] a transmembrane domain (TM), wherein the TM or a portion of the TM may be derived from a coronavirus S-protein and
   [0153] a cytosolic tail (CT), wherein the CT or a portion of the CT is derived from an influenza hemagglutinin (HA) protein.

[0154] The TM or portion of the TM may directly be fused or joined to the CT or portion of the CT or the TM or portion of the TM may be fused or joined to the CT or portion of the CT by an intervening peptide sequence.

[0155] Furthermore, the TM may be a chimeric TM that may comprise a N terminal sequence derived from the coronavirus S-protein TM and a C terminal sequence derived from the influenza HA protein TM. The CT may be a chimeric CT that may comprise a N terminal sequence derived from the coronavirus S-protein CT and a C terminal sequence derived from the influenza HA protein CT.

[0156] Accordingly, the chimeric TMCT, may comprise a native coronavirus S-protein TM, a chimeric coronavirus S-protein/influenza HA TM, a native influenza HA CT, a chimeric influenza HA/coronavirus S-protein CT or a combination thereof. The chimeric coronavirus S-protein/influenza HA TM comprises sequences from the TM of coronavirus S-protein and sequences from the TM of influenza HA. Similarly, the chimeric influenza HA/coronavirus S-protein CT comprises sequences from the CT of influenza HA and sequences from the CT of coronavirus S-protein.

[0157] A “chimeric transmembrane and cytosolic tail domain” or “chimeric TMCT” refers to a TMCT that is not native to the coronavirus S-protein TMCT. The chimeric TMCT comprises sequences that are not found together in nature. Thus the TMCT may comprise sequences that are heterologous to the ectodomain of the coronavirus S-protein. The term “heterologous” refers to a sequence or domain originating from different biological or synthetic sources. For example, the chimeric TMCT may comprise a TM or portion of a TM that is derived from the same coronavirus S-protein as the ectodomain, i.e. the TM may be homologous to the ectodomain of the S-protein or the TM or portion of the TM may be derived from a different viral TM, for example a TM from a different coronavirus S-protein as the ectodomain, i.e. the TM may be heterologous to the ectodomain of the S-protein. The CT or portion of the CT may be derived from a CT that is heterologous to the ectodomain, the TM, or both the ectodomain and the TM of the modified S-protein.

[0158] The coronavirus S protein, the modified S protein or the ectodomain and the transmembrane domain or portion of the transmembrane domain of the modified coronavirus S protein may be derived from any member of the Coronaviridae family of viruses. For example the coronavirus S-protein, the modified S-protein or the ectodomain and the transmembrane domain of the modified coronavirus S-protein may for example be derived from a Coronavirus, such as an Alphacoronavirus (Alpha-CoV), a Betacoronavirus (Beta-CoV), a Gammacoronavirus (Gamma-CoV) or a Deltacoronavirus (Delta-CoV). For example, the Coronavirus may be an Alphacoronavirus (Alpha-CoV) or a Betacoronavirus (Beta-CoV). The Alphacoronavirus may be a Duvinacovirus, such as for example HCoV-229E (229E-CoV), or may be a Setracovirus, such as for example HCoV-NL63. In a preferred embodiment, the Coronavirus is a Betacoronavirus (Beta-CoV). The Betacoronavirus may be a lineage A Betacoronavirus, such as for example HCoV-OC43 (OC43-CoV) or HCoV-HKU1 (HKU1-CoV), a lineage B Betacoronavirus, such as for example SARS-CoV (also referred to as SARS-CoV-1) or SARS-CoV-2 and variants thereof or a lineage C Betacoronavirus, such as for example MERS-CoV.

[0159] The coronavirus S-protein, the modified S-protein or the ectodomain and the transmembrane domain or portion of the transmembrane domain of the modified coronavirus S-protein may further be derived from variants of the SARS-CoV-2 lineage, including but not limited to the B.1.1.7 strain (“Alpha” variant) (20I/501Y.V1, MW531680.1), the B.1.351 strain (“Beta” variant) (20H/501Y.V2), the P.1 strain (“Gamma” variant) (20J/501Y.V3), the B 1.617.2 strain (“Delta” variant), the B.1.525 strain, the B.1.429 strain (the “ETA” variant) or other variants of strains comprising mutations that arise naturally in the coronavirus S protein, or naturally occurring recombinant strains thereof.

[0160] In one embodiment the ectodomain and the transmembrane domain or portion of the transmembrane domain of the modified viral structural protein are derived from the spike protein (S) of a Coronavirus of the SARS-CoV-2 lineage (also referred to as SARS-CoV-2 variants). In other embodiments the ectodomain and the transmembrane domain or portion of the transmembrane domain of the modified viral structural protein are derived from the spike protein (S) of SARS-CoV-1, MERS-CoV, OC43-CoV or 229E-CoV or variants thereof.

[0161] With reference to modified viral structural protein, the term “modified” as used herein may refer to the replacement of the cytoplasmic tail domain (CT) or portion of the CT in a structural protein from Coronaviridae with the CT or portion of the CT of a heterologous virus. For example a modified viral structural protein may be a Coronavirus S protein wherein the CT or portion of the CT of the S protein has been replaced with the CT or portion of the CT of influenza hemagglutinin (HA).

[0162] Therefore the modified viral structural protein may be a modified coronavirus spike (S) protein comprising a transmembrane domain (TM) or portion of a TM, and a cytosolic tail (CT) or portion of a CT, wherein the CT or portion of the CT may be derived from an influenza hemagglutinin (HA) protein and wherein the TM or portion of the TM is heterologous to the CT or portion of the CT. Furthermore, the modified S protein comprises a transmembrane domain (TM) or portion of the TM, and a cytosolic tail (CT) or portion of the CT, wherein the CT or portion of the CT may be derived from an influenza hemagglutinin (HA) protein and wherein the CT or portion of the CT is heterologous to the TM or portion of the TM.

[0163] Therefore, in one aspect it is provided a modified coronavirus spike (S) protein comprising a transmembrane domain (TM) or portion of a TM, and a cytosolic tail (CT) or portion of a CT, wherein the CT or portion of the CT is derived from an influenza hemagglutinin (HA) protein and wherein the TM or portion of the TM is heterologous to the CT or portion of the CT. The modified coronavirus spike (S) protein is also referred to as modified S protein.

[0164] The cytoplasmic tail domain may also be referred to as “cytoplasmic tail”, “cytosolic tail”, “cytosolic tail domain”, “CT, “CTD”, “cytoplasmic domain”, “cytoplasm domain”, “CP, “CPD” or “C-terminal domain” and similar expressions. The cytoplasmic tail domain may also encompass portions of the cytoplasmic tail domain.

[0165] It has been found that the modified viral structural protein such as a modified S protein as disclosed herewith has improved characteristics as compared to the wild-type or unmodified viral structural protein (for example the S-protein). Examples of improved characteristics of the modified viral structural protein such as the modified S protein include but are not limited to: increased yield of the modified viral structural protein when expressed in a host or host cell as compared to the wild-type or unmodified viral structural protein; improved integrity, stability, or both integrity and stability, of the viral structural protein when expressed in a host or host cell as compared to the wild-type or unmodified viral structural protein; improved integrity, stability, or both integrity and stability, of virus like particles (VLPs) that are comprised of the modified viral structural protein as compared to the integrity, stability or integrity and stability of VLPs comprising to viral structural protein that does not comprise the modification as described herewith; increased yield of VLPs comprising modified viral structural protein when expressed in host cells as compared to the yield of VLPs that do not comprise the modified viral structural protein that are expressed in same or substantially similar host cells.

[0166] Furthermore, methods of producing virus like particle (VLP) comprising modified viral structural protein such as the modified S protein in a host or host cell are also described. It has been observed that when VLPs are produced that comprise a modified viral structural protein such as the modified S protein wherein the native or wild-type CT has been replaced with a CT of influenza HA as described herein, the yield of VLP production in a host is increased compared to the yield of VLP that comprise viral structural protein that either i) comprise the native CT or ii) comprise a modified viral structural protein wherein the transmembrane domain (TM) and the CT have been replaced with the TM and the CT of an influenza HA.

[0167] The transmembrane domain may also be referred to as “TM” or “TMD”. The transmembrane and cytoplasmic tail domain may be referred to as TMCT or TM/CT.

[0168] FIG. 3A shows that when a modified S protein (e.g. modified SARS-CoV-2 S-protein) was expressed in plants, the yield or protein accumulation (expressed as fold-change) of the modified S protein was increased approximately 2 fold when the native transmembrane and cytoplasmic tail (TMCT) was replaced with a TMCT from influenza HA (constructs 8592, 8595, and 8597) compared to the yield or protein accumulation of S protein with native TMCT (constructs 8586, 8589, and 8591). Furthermore, when a modified S protein (e.g. modified SARS-CoV-2 S-protein) wherein only the cytoplasmic tail (CT) was replaced with the CT of influenza HA (constructs 8610, 8611, and 8671) was expressed in plants, the protein accumulation of the modified S protein with the CT of influenza HA (expressed as fold-change), further increased between approximately 1.74 to 2.14 times, as compared to accumulation of modified S protein wherein the TMCT had been replaced with the TMCT of influenza HA. Correspondingly, the protein accumulation of the modified S protein with the CT of influenza HA increased between approximately 3.57 to 4.40 times, as compared to accumulation of S protein with the native transmembrane and cytoplasmic tail (wtTMCT).

[0169] FIG. 3B shows that higher protein accumulation was observed for modified S protein (modified SARS-CoV-2 S-protein) with a cytoplasmic tail from influenza HA (H5i CT) when compared to protein accumulation of S protein with a wild-type TMCT (wt TMCT) or a modified S protein with the TMCT of influenza HA (H5i TMCT) from crude plant extract. Modified S protein with a cytoplasmic tail from influenza HA (H5i CT) is visible by Coomassie blue staining alone. The bands for modified S protein with a cytoplasmic tail from influenza HA (H5i CT) are more pronounced and thicker compared to the band of S protein with a wild-type TMCT (wt TMCT) or modified S protein with the TMCT of influenza HA (H5i TMCT)—see bands at about 150 kDa marked as S protein. Thickness of bands correspond to the amount of protein present, indicating that more protein accumulated for the H5i CT S protein. This higher protein accumulation was observed irrespective of the expression enhancer that was used.

[0170] As further discussed in more detail below, similar results were obtained, wherein the modified S-protein comprises a SARS-CoV-1 S protein with a cytoplasmic tail from influenza HA (see FIG. 16A) or a MERS CoV S protein with a cytoplasmic tail from influenza HA (see FIG. 19A).

[0171] FIG. 3C shows S protein (SARS-CoV-2 S protein) accumulation by Western blot analysis of crude plant extract. When a modified S protein with a cytoplasmic tail from influenza HA (H5i CT) was expressed in plants, higher accumulation of modified S protein was observed compared to S protein with a wild-type TMCT (wt TMCT) and a modified S protein wherein both the transmembrane domain and the cytoplasmic tail (TMCT) domain have been replaced with the TMCT from influenza HA (H5i TMCT). The Western blot analysis in FIG. 3C further shows that the SARS CoV-2 S-protein comprises both an S1 domain/subunit (top panel, detection with anti-SARS-CoV-2 S1 antibody) and an S2 domain/subunit (bottom panel, detection with an anti-SARS-CoV-2 S2 antibody) and has a molecular weight of about 150 kDa.

[0172] The present description provides a modified viral structural protein, wherein the modified viral structural protein may be a modified Coronavirus Spike or Surface Protein (S protein). The modified S protein comprising, in series, an ectodomain, a transmembrane domain (TM) or portion of a TM, and a cytosolic tail (CT) domain or portion of a CT, wherein the ectodomain and the transmembrane domain are derived from Coronavirus, and the CT or portion of the CT is derived from a CT of influenza hemagglutinin (HA) protein. The ectodomain and the transmembrane domain or portion of the TM may be derived from the same Coronavirus. Therefore, the ectodomain and the transmembrane domain or portion of the TM of the modified structural protein are homologues (i.e. not heterologous) to each other, whereas the CT or portion of the CT is heterologous to the ectodomain and the transmembrane domain.

[0173] Furthermore, the transmembrane domain (TM) or portion of the TM of the modified S protein may be derived from a different Coronavirus than the ectodomain. Therefore, the TM or portion of the TM in the modified S protein may be heterologous (not homologous) to both the ectodomain and the CT domain or portion of the CT of the modified S protein. Similarly, the ectodomain may be heterologous (not homologous) to the TM or portion of the TM and the CT domain or portion of the CT of the modified S protein. For example, the ectodomain of the modified S protein may be derived from a first Coronavirus, the TM or portion of the TM may be derived from a second Coronavirus and the CT or portion of the CT may be derived from an influenza HA. The first Coronavirus and the second Coronavirus may belong to different Coronavirus families, sub-groups, types, subtypes, lineages or strains. The first Coronavirus and second Coronavirus may therefore be heterologous to each other and also each heterologous to the virus family from which the CT or portion of the CT is derived.

[0174] For example, the first Coronavirus from which the S protein ectodomain is derived, may be from any Coronavirus such for example an Alphacoronavirus (Alpha-CoV) or a Betacoronavirus (Beta-CoV). A non-limiting example of the first coronavirus from which the ectodomain of the S protein may be derived is a Duvinacovirus, such for example HCoV-229E, a Setracovirus, such for example HCoV-NL63. a lineage A Betacoronavirus, such for example HCoV-OC43 or HCoV-HKU1, a lineage B Betacoronavirus, such for example SARS-CoV or SARS-CoV 2 or a lineage C Betacoronavirus such for example MERS-CoV. The second Coronavirus, from which the TM is derived, may belong to a different Coronavirus family, sub-group, type, subtype, lineage or strain than the first Coronavirus from which the ectodomain is derived. For example the second Coronavirus from which the S protein TM is derived, may be from any Coronavirus such for example an Alphacoronavirus (Alpha-CoV) or Betacoronavirus (Beta-CoV), as long as the second Coronavirus is heterologous to the first Coronavirus. A non-limiting example of the second coronavirus from which the TM of the S protein may be derived is a Duvinacovirus, such for example HCoV-229E (also referred to as 229E-CoV), a Setracovirus, such for example HCoV-NL63 (NL63-CoV), a lineage A Betacoronavirus, such for example HCoV-OC43 (also referred to as OC43-CoV) or HCoV-HKU1 (HKU1-CoV), a lineage B Betacoronavirus, such for example SARS-CoV (also referred to as SARS-CoV 1) or SARS-CoV 2 or a lineage C Betacoronavirus such for example MERS-CoV (also simply referred to as “MERS”).

[0175] The domains in a Coronavirus S protein, such as the SARS-CoV-1 S-protein, SARS-CoV-2 S-protein, MERS CoV S-protein, OC43-CoV S-protein, or 229E-CoV S-protein, may readily be identified by methods known within the art. For example, domains such as transmembrane domains, may be identified by determining the degree of hydrophobicity of an amino acid sequence of the protein, for example using a transmembrane prediction program (e.g. Expert Protein Analysis System; ExPASy.org, operated by the Swiss Institute of Bioinformatics; or the Dense Alignment Surface Method, Cserzo M., et al. 1997, Prot. Eng. vol. 10, no. 6, 673-676; Lolkema J. S. 1998, FEMS Microbiol Rev. 22, no 4, 305-322), by determining the hydropathy profile of the amino acid sequence of the protein (e.g. Kyte-Doolittle Hydropathy Profile), by determining the three-dimensional protein structure and identifying the structure that is thermodynamically stable in a membrane (e.g. a single alpha helix, a stable complex of several transmembrane alpha helices, a transmembrane beta barrel, a beta-helix, or any other structure that is thermodynamically stable in a membrane).

[0176] Furthermore, domains within a Coronavirus S protein may be determined by comparison to known protein sequences for example by sequence alignment. Methods of alignment of sequences for comparison are well-known in the art and as further described below.

[0177] Domains and domain organization of Coronavirus S protein are well known and have been described. All Coronavirus spike proteins (S protein) share the same organization in two subunits or domains: a N-terminal subunit (or domain) named S1 that is responsible for receptor binding and a C-terminal S2 subunit (or domain) responsible for virus attachment, membrane fusion and virus entry.

[0178] FIG. 1A shows a schematic representation of the Coronavirus S protein with its subunits and domains and the location of the S1/S2 and S2′ cleavage sites. The S1 subunit is distal to the virus membrane and contains the receptor-binding domain (RBD) that mediates virus attachment to its host receptor. The S2 subunit contains fusion protein machinery, such as the fusion peptide, two heptad-repeat sequences (HR1 and HR2), a central helix typical of fusion glycoproteins and a transmembrane domain, and the cytosolic tail domain (see for example Kirchdoerfer et al. Nature 2016 Mar. 3; 531(7592):118-2, which is herein incorporated by reference).

[0179] The transmembrane domain (TM) and the cytoplasmic tail domain (CT) are positioned at the C-terminal end of the S2 subunit. While these domains are conserved in all coronaviruses (see FIG. 1A and Corver et al. 2009, Virol J. 2009; 6: 230, which is herein incorporated by reference), different references, groups and authors have referred to different amino acid numbering with respect to these domains.

[0180] For example, amino acids (aa): 1214-1234 may be assigned to the TM and aa 1235-1273 may be assigned to the CT in the S protein of SARS-CoV-2 (see for example UniProtKB-P0DTC2 (SPIKE_SARS2)). When aligning the sequence of SARS-CoV-2 (SEQ ID NO. 1) with the sequence of SARS-CoV-1 of Kirchdoerfer et al. (Nature 2016 Mar. 3; 531(7592):118-2) the SARS-CoV-2 TM corresponds to amino acids 1214-1236 and the SARS-CoV-2 CT corresponds to amino acids: 1237-1273.

[0181] For the purpose of this disclosure, the TM and CT of the native (unmodified) S protein corresponds to the following amino acids when aligned to a Coronavirus S protein reference sequence (SEQ ID NO: 1): TM: amino acids 1214-1234 and CT: amino acids: 1235-1273.

[0182] When 15 amino acids comprising the signal peptide (SP) are removed from the S protein, the TM corresponds to amino acids 1199-1219 of reference sequence SEQ ID NO: 2 and the CT corresponds to amino acids 1220-1258 of SEQ ID NO:2. (see also Table 1 for reference sequences and numbering).

[0183] The TM of Coronavirus S-protein has a highly conserved N-terminal aromatic rich stretch, followed by a hydrophobic sequence (see FIG. 22 and Corver et al. Virology Journal volume 6, 230 (2009)). The consensus sequence of Coronavirus S-protein TM domain is:

(SEQ ID NO: 132)
WYXWLGFIAGLXAXXX{X}VXXXL, (wherein {X} may be
absent).

[0184] For example, the Coronavirus S-protein TM domain consensus sequence may be:

(SEQ ID NO: 133)
WY[I/V]WLGFIAGL[V/I]A[L/I][A/V][L/M]{X}V[F/T][F/I]
XL, (wherein {X} may be C or absent).

TABLE 1
Non-limiting examples of positions of TM and CT
domains in modified S protein and corresponding
amino acid positions in reference sequences.

| | Transmembrane | Cystoplasmic Tail |
|---|---|---|
| S Protein | Domain (TM) | Domain (CT) |
| Modified S Protein¹ | 1199-1219 | 1220-1235 |
| [SARS-CoV-2 H5iCT] | | |
| (SEQ ID NO: 21) | | |
| SARS-CoV-2² | 1214-1234 | 1235-1273 |
| (SEQ ID NO. 1) | | |
| SARS-CoV-2³ | 1199-1219 | 1220-1258 |
| (SEQ ID NO: 2) | | |
| SARS-CoV | 1196-1216 | 1217-1255 |
| (SARS-CoV-1)² | | |
| (SEQ ID NO: 112) | | |
| SARS-CoV | 1183-1203 | 1204-1242 |
| (SARS-CoV-1)³ | | |
| (SEQ ID NO: 114) | | |
| MERS | 1297-1318 | 1319-1353 |
| (MERS-CoV)² | | |
| (SEQ ID NO: 113) | | |
| MERS | 1280-1301 | 1302-1336 |
| (MERS-CoV)³ | | |
| (SEQ ID NO: 115) | | |
| OC43-CoV² | 1233-1325 | 1326-1360 |
| (SEQ ID NO: 158) | | |
| OC43-CoV³ | 1291-1311 | 1312-1346 |
| (SEQ ID NO: 160) | | |
| 229E-CoV² | 1116-1135 | 1136-1173 |
| (SEQ ID NO: 159) | | |
| 229E-CoV³ | 1100-1119 | 1120-1157 |
| (SEQ ID NO: 161) | | |

¹numbering excludes signal peptide, CT is derived from influenza HA
²numbering includes signal peptide, CT is native
³numbering excludes signal peptide, CT is native

[0185] While there are differences in the numbering of the residues assigned to the TM and CT domain, a person of skill in the art will be able to determine the borders or boundaries of these domains in a Coronavirus S-protein by using known methods as for example described below.

[0186] In the modified Coronavirus S protein, the heterologous CT or portion of the CT that may be derived from influenza HA may be directly fused to the C-terminal end of the TM or portion of the TM of the Coronavirus S protein, or the heterologous CT or portion of the CT may be fused to the C-terminal end of the TM or portion of the TM of the Coronavirus S protein with an intervening peptide sequence (also referred to as a linker or linker sequence). Accordingly, the modified S-protein may comprise a intervening peptide, wherein the intervening peptide sequence fuses the CT or portion of the CT to the C-terminal end of the TM or portion of the TM.

[0187] The heterologous CT, portion of the CT or the intervening peptide sequence with the heterologous CT may be fused to an amino acid in the C-terminal portion of the TM domain (for example within 4 amino acids of the C-terminus of the TM domain as defined in Table 1 with reference to SEQ ID NO: 1, 2, 21, 114, 115, 160 or 161) or the N-terminal portion of the CT domain (for example within 4 amino acids of the N-terminus of the CT domain as defined in Table 1 with reference to SEQ ID NO: 1, 2, 21, 114, 115, 160 or 161).

[0188] For example, the Coronavirus TM may end at an amino acid residue that corresponds to any one of amino acids 1230-1238 of SEQ ID NO: 1. Accordingly, the C-terminal end of the Coronavirus TM may be an amino acid that corresponds to any one of amino acids 1230-1238 of SEQ ID NO: 1. In one example the Coronavirus TM may end at an amino acid residue that corresponds to amino acid 1230 in SEQ ID NO: 1. In another example, the TM may end at an amino acid residue that corresponds to amino acid 1231 in SEQ ID NO: 1. In a further example, the TM may end at an amino acid residue that corresponds to amino acid 1232 in SEQ ID NO: 1. In another example, the TM may end at an amino acid residue that corresponds to amino acid 1233 in SEQ ID NO: 1. In a further example, the TM may end at an amino acid residue that corresponds to amino acid 1234 in SEQ ID NO: 1. In another example, the TM may end at an amino acid residue that corresponds to amino acid 1235 in SEQ ID NO: 1. In another example, the TM may end at an amino acid residue that corresponds to amino acid 1236 in SEQ ID NO: 1. In another example, the TM may end at an amino acid residue that corresponds to amino acid 1237 in SEQ ID NO: 1. In another example, the TM may end at an amino acid residue that corresponds to amino acid 1238 in SEQ ID NO: 1. In a preferred embodiment the TM may end at an amino acid residue that corresponds to amino acid 1234 in SEQ ID NO: 1.

[0189] In another example, the Coronavirus TM or portion of the TM may end at an amino acid residue that corresponds to any one of amino acids 1215-1219 of SEQ ID NO: 2 or 21. Accordingly, the C-terminal end of the Coronavirus TM or portion of the TM may be an amino acid that corresponds to any one of amino acids 1215-1224 of SEQ ID NO: 2 or 21. In one example the Coronavirus TM or portion of the TM may end at an amino acid residue that corresponds to amino acid 1215 in SEQ ID NO: 2 or 21. In another example, the TM or portion of the TM may end at an amino acid residue that corresponds to amino acid 1216 in SEQ ID NO: 2 or 21. In a further example, the TM or portion of the TM may end at an amino acid residue that corresponds to amino acid 1217 in SEQ ID NO: 2 or 21. In another example, the TM or portion of the TM may end at an amino acid residue that corresponds to amino acid 1218 in SEQ ID NO: 2 or 21. In another example, the TM or portion of the TM may end at an amino acid residue that corresponds to amino acid 1219 in SEQ ID NO: 2 or 21.

[0190] The intervening peptide sequence that may fuse the heterologous CT to the C-terminal end of the TM or portion of the TM from the Coronavirus S protein may have a length from 0-10 amino acids. Accordingly, the intervening peptide sequence may have a length of 0, 1, 2, 3, 4, 5, 6, 7, 8, 9 or 10 amino acids. The intervening peptide sequence may be derived from a Coronavirus protein, for example the intervening peptide sequence may be derived from the C-terminal end of the TM from a Coronavirus S protein or from the N-terminal end of the CT of a Coronavirus S protein or both. The intervening peptide sequence may further be derived from an influenza HA protein, for example the intervening peptide sequence may be derived from the C-terminal end of the TM from influenza HA protein or from the N-terminal end of the CT of influenza HA protein, or both. Furthermore, the intervening peptide sequence may be heterologous to the Coronavirus and/or the HA portion of the modified S protein or the intervening peptide sequence may be an artificial sequence.

[0191] Non-limiting examples of sequences of the TM/CT domain (also referred to as chimeric TMCT) of the modified S protein are as shown below. The sequence of the TM domain from Coronavirus S-protein is underlined and the CT domain derived from influenza HA is shown in bold. Sequences in italic and bold are sequences derived from the TM of influenza HA. Sequences in italic and underlined are sequences derived from the CT of Coronavirus S-protein.

SARS-CoV-2
(SEQ ID NO: 18)
WYIWLGFIAGLIAIVMVTIMLSLWMCSNGSLQCRICI (wtTM/H5iCT)
(SEQ ID NO: 19)
WYIWLGFIAGLIAIVMVTIMMAGLSLWMCSNGSLQCRICI (wtTM/
H5iCT V1)
(SEQ ID NO: 37)
WYIWLGFIAGLIAIVMVTIMAGLSLWMCSNGSLQCRICI (wtTM/
H5iCT V2)
(SEQ ID NO: 38)
WYIWLGFIAGLIAIVMVTIMLCCMCSNGSLQCRICI (wtTM/H5ICT
V3)
(SEQ ID NO: 39)
WYIWLGFIAGLIAIVMVTIMLCCSNGSLQCRICI (wtTM/H5iCT V4)
(SEQ ID NO: 126)
WYIWLGFIAGLIAIVMVTIMLSFWMCSNGSLQCRICI (wtTM/HliCT)
(SEQ ID NO: 127)
WYIWLGFIAGLIAIVMVTIMLMWACQKGNIRCNICI (wtTM/H3iCT)
(SEQ ID NO: 128)
WYIWLGFIAGLIAIVMVTIMLGLWMCSNGSMQCRICI (wtTM/H6iCT)
(SEQ ID NO: 129)
WYIWLGFIAGLIAIVMVTIMLVFICVKNGNMRCTICI (wtTM/H7iCT)
(SEQ ID NO: 130)
WYIWLGFIAGLIAIVMVTIMLLEWAMSNGSCRCNICI (wtTM/H9iCT)
(SEQ ID NO: 131)
WYIWLGFIAGLIAIVMVTIMLVVYMVSRDNVSCSICL (wtTM/BiCT)
SARS-CoV-1
(SEQ ID NO: 118)
WYVWLGFIAGLIAIVMVTILLSLWM CSNGSLQCRICI (wtTM/
H5iCT)
(SEQ ID NO: 119)
WYVWLGFIAGLIAIVMVTILLCCSNGSLQCRICI (wtTM/H5ICT V4)
(SEQ ID NO: 120)
WYVWLGFIAGLIAIVMVTILLSFWM CSNGSLQCRICI (wtTM/
H1cCT)
MERS-COV
(SEQ ID NO: 123)
WYIWLGFIAGLVALALCVFFILSLWMCSNGSLQCRICI (wtTM/
H5iCT)
(SEQ ID NO: 124)
WYIWLGFIAGLVALALCVFFILCCSNGSLQCRICI (wtTM/H5iCT
V4)
(SEQ ID NO: 125)
WYIWLGFIAGLVALALCVFFILSFWMCSNGSLQCRICI (wtTM/
H1cCT)
OC43-CoV
(SEQ ID NO: 164)
WYVWLLICLAGVAMLVLLFFISLWMCSNGSLQCRICI (wtTM/H5iCT)
(SEQ ID NO: 165)
WYVWLLICLAGVAMLVLLFFICCSNGSLQCRICI (wtTM/H5ICT V4)
(SEQ ID NO: 166)
WYVWLLICLAGVAMLVLLFFISFWMCSNGSLQCRICI (wtTM/
H1cCT)
229E-CoV
(SEQ ID NO: 169)
WWVWLCISVVLIFVVSMLLLSLWMCSNGSLQCRICI (wtTM/H5iCT)
(SEQ ID NO: 170)
WWVWLCISVVLIFVVSMLLLCCSNGSLQCRICI (wtTM/H5ICT V4)
(SEQ ID NO: 171)
WWVWLCISVVLIFVVSMLLLSFWMCSNGSLQCRICI (wtTM/H1cCT)

[0192] The modified coronavirus S-protein may comprise a chimeric TMCT. For example, the chimeric TMCT may comprise N-terminal sequences derived from coronavirus S-protein and C-terminal sequence derived from influenza HA protein as indicated in Table 1B. The TM may comprise the sequences as indicated in the column labeled as “S-protein TM sequences” and the CT may comprise the sequences as indicated in the column labeled as “HA protein CT sequence”. The CT and TM may be joined by the sequences as indicated in columns labeled as “S-protein CT sequence” and/or “HA protein TM sequence” (also referred to as intervening sequences or linker, as further described below).

TABLE 1B
Non-limiting examples of TM and CT sequences in
modified S protein. The amino acid positions
within the reference sequences are indicated.

| SEQ | S-protein | S-protein | HA protein | HA protein |
|---|---|---|---|---|
| ID NO: | TM sequence | CT sequence | TM sequence | CT sequence |
| 18 | 1-21 | — | — | 22-37 |
| 19 | 1-20 | — | 21-24 | 25-40 |
| 37 | 1-20 | — | 21-23 | 24-39 |
| 38 | 1-21 | 22-24 | — | 25-36 |
| 39 | 1-21 | 22-23 | — | 24-34 |
| 126 | 1-21 | | | 22-37 |
| 127 | 1-21 | | | 22-36 |
| 128 | 1-21 | | | 22-37 |
| 129 | 1-21 | | | 22-37 |
| 130 | 1-21 | | | 22-37 |
| 131 | 1-21 | | | 22-37 |
| 118 | 1-21 | | | 22-37 |
| 119 | 1-21 | 22-23 | — | 24-34 |
| 120 | 1-21 | | | 22-37 |
| 123 | 1-22 | | | 23-38 |
| 124 | 1-22 | 23-24 | — | 25-35 |
| 125 | 1-22 | | | 23-38 |
| 164 | 1-21 | | | 22-37 |
| 165 | 1-21 | 22-23 | — | 24-34 |
| 166 | 1-21 | | | 22-37 |
| 169 | 1-20 | | | 21-36 |
| 170 | 1-20 | 21-22 | — | 23-33 |
| 171 | 1-20 | | | 21-36 |

[0193] For example, the N-terminal sequence derived from coronavirus S-protein TM may comprise at least the following:
[0194] at least 19 amino acids corresponding to amino acids 1-19 of SEQ ID NO: 18, 19, 37, 38, 39, 118, 119, 123, 124, 164, 165, 169 or 170;
[0195] at least 20 amino acids corresponding to amino acids 1-20 of SEQ TD NO: 18, 19, 37, 38, 39, 118, 119, 123, 124, 164, 165, 169 or 170;
[0196] at least 21 amino acids corresponding to amino acids 1-21 of SEQ ID NO: 18, 19, 37, 38, 39, 118, 119, 123, 124, 164, 165, 169 or 170;
[0197] at least 22 amino acids corresponding to amino acids 1-22 of SEQ ID NO: 18, 19, 37, 38, 39, 118, 119, 123, 124, 164, 165, 169 or 170;
[0198] at least 23 amino acids corresponding to amino acids 1-23 of SEQ ID NO: 18, 19, 37, 38, 39, 118, 119, 123, 124, 164, 165, 169 or 170;
[0199] at least 24 amino acids corresponding to amino acids 1-24 of SEQ ID NO: 18, 19, 37, 38, 39, 118, 119, 123, 124, 164, 165, 169 or 170.

[0200] The N-terminal sequence derived from the coronavirus S-protein TM may comprise at least 20 amino acids corresponding to amino acids 1-20 of SEQ ID NO: 18 or 169, or at least 21 amino acids corresponding to amino acids 1-21 of SEQ ID NO: 118 or 164, or at least 22 amino acids corresponding to amino acids 1-22 of SEQ ID NO: 123 and one or more than one amino acid from the C-terminal end of the influenza HA protein TM. The N-terminal sequence derived from the coronavirus S-protein TM may comprise at least 20 amino acids corresponding to amino acids 1-20 of SEQ ID NO: 18 or 169, or at least 21 amino acids corresponding to amino acids 1-21 of SEQ ID NO: 118 or 164, or at least 22 amino acids corresponding to amino acids 1-22 of SEQ ID NO: 123 and one or more than one amino acid from the C-terminal end of the influenza HA protein TM. The one or more than one amino acid from the C-terminal end of the influenza HA protein TM may comprise 0, 1, 2, 3, 4, 5, 6, 7, 8, 9 or 10 amino acids. For example the one or more than one amino acid may be 2, 3 or 4 amino acids. The one or more than one amino acid from the C-terminal end of the influenza HA protein TM may be A, C, G, L, S, M, W or conserved substitution of A, C, G, L, S, M, W, or a combination thereof. In one example the one or more than one amino acid from the C-terminal end of the influenza HA protein TM may be selected from AG or conserved substitution of AG, AGL or conserved substitution of AGL, MAGL or conserved substitution of MAGL.

[0201] The modified coronavirus S-protein may also comprise a chimeric CT comprising a N-terminal sequence derived from the coronavirus S-protein CT and a C-terminal sequence derived from the influenza HA protein CT.

[0202] The N-terminal sequence derived from the coronavirus S-protein CT may comprise one or more than one amino acid. The one or more than one amino acid from the N terminal end of the coronavirus S-protein CT may comprise 0, 1, 2, 3, 4 or 5 amino acids. For example the one or more than one amino acid may be 1, 2 or 3 amino acids. The one or more than one amino acid from the N-terminal end of the coronavirus S-protein CT may be C or M or conserved substitutions of C or M. In one example the one or more than one amino acids from the N-terminal end of the coronavirus S-protein may be selected from C or a conserved substitution of C, CC or a conserved substitution of CC, or CCM or a or a conserved substitution of CCM.

[0203] The C-terminal sequence derived from the influenza HA protein CT may comprise at least 11 amino acids corresponding to amino acids 27-37 of SEQ ID NO: 18.

[0204] The N-terminal sequence derived from the influenza HA protein CT may further comprise at least 12 amino acids corresponding to amino acids 26-37 of SEQ ID NO: 18, at least 13 amino acids corresponding to amino acids 25-37 of SEQ ID NO: 18, at least 14 amino acids corresponding to amino acids 24-37 of SEQ ID NO: 18, at least 15 amino acids corresponding to amino acids 23-37 of SEQ ID NO: 18, or at least 16 amino acids corresponding to amino acids 22-37 of SEQ ID NO: 18.

[0205] In another example, the C-terminal sequence derived from the influenza HA protein CT may comprise at least the following:
[0206] at least 11 amino acids corresponding to amino acids 27-37 of SEQ ID NO: 126, 127, 128, 129, 130 or 131;
[0207] at least 12 amino acids corresponding to amino acids 26-37 of SEQ ID NO: 126, 127, 128, 129, 130 or 131;
[0208] at least 13 amino acids corresponding to amino acids 25-37 of SEQ ID NO: 126, 127, 128, 129, 130 or 131;
[0209] at least 14 amino acids corresponding to amino acids 24-37 of SEQ ID NO: 126, 127, 128, 129, 130 or 131;
[0210] at least 15 amino acids corresponding to amino acids 23-37 of SEQ ID NO: 126, 127, 128, 129, 130 or 131; or
[0211] at least 16 amino acids corresponding to amino acids 22-37 of SEQ ID NO: 126, 127, 128, 129, 130 or 131.

[0212] For example the CT may comprise the sequences as indicated in Table 1B (HA protein CT sequence). For example the CT may comprise amino acids 22-37 of SEQ ID NO: 18, 126, 128, 129, 130, 131, 118, 120, 164 or 166; or amino acids 25-40 of SEQ ID NO: 19; or amino acids 24-39 of SEQ ID NO: 37; or amino acids 25-36 of SEQ ID NO: 38; or amino acids 24-34 of SEQ ID NO: 39 or 119; or amino acids 22-36 of SEQ ID NO: 127; or amino acids 22-37 of SEQ ID NO: 118 or 164; or amino acids 23-38 of SEQ ID NO: 123 or 125; or amino acids 25-35 of SEQ ID NO: 124; or amino acids 24-34 of SEQ ID NO: 165; or amino acids 21-36 of SEQ ID NO: 169; or amino acids 23-33 of SEQ ID NO: 170; or amino acids of SEQ ID NO: 21-36.

[0213] The influenza CT or portion of the CT may be fused or joined to the TM or portion of the TM of the S-protein with an intervening peptide sequence. For example, the intervening peptide sequence may be derived from the influenza CT, the S-protein TM or a combination thereof or the intervening peptide sequence may be an artificial sequence. The intervening peptide sequence may be of varying length. For example, the intervening peptide sequence may be 1, 2, 3, 4, 5, 6, 7, 8, 9 or 10 amino acid long, preferably the intervening peptide sequence is between 2 and 8 amino acids long. In one example the intervening peptide sequence is 2 amino acid long and may for example comprise the sequence LC. In another example the intervening peptide sequence is 4 amino acids long and may for example comprise the sequence LCCM. In another example the intervening peptide sequence may be 5 amino acids long and may for example comprise the sequence LSLWM. In another example the intervening peptide sequence may be 7 amino acids long and may for example comprise the sequence AGLSLWM. In a further example the intervening peptide sequence may be 8 amino acids long and may for example comprise the sequence MAGLSLWM.

[0214] For example the TMCT of the modified S-protein may comprise the following sequence or a sequence that has 90-100%, or any amount therebetween sequence identity, or sequence similarity to:

(SEQ ID NO: 64)
WYIWLGFIAGLIAIVMVTIM - (X)n - CSNGSXXCXICI,
(SEQ ID NO: 134)
WYVWLGFIAGLIAIVMVTIL - (X)n - CSNGSXXCXICI,
or
(SEQ ID NO: 135)
WYIWLGFIAGLVALALCVFFIL - (X)n - CSNGSXXCXICI,
(SEQ ID NO: 172)
WYVWLLICLAGVAMLVLLFFI - (X)n - CSNGSXXCXICI,
(SEQ ID NO: 173)
WWVWLCISVVLIFVVSMLLL - (X)n - CSNGSXXCXICI,

[0215] wherein (X)ₙ is the intervening peptide sequence, wherein the intervening peptide sequence may have a length from 0 to n amino acid residues, wherein n may be any length from 0-10, for example 0, 1, 2, 3, 4, 5, 6, 7, 8, 9 or 10 amino acids and wherein X may comprise any amino acid, for example X may be A, C, G, F, L, S, M, W or conserved substitution of A, C, G, F, L, S, M, W, or a combination thereof.

[0216] Non-limiting intervening peptide sequences (X)ₙ may include the following:
[0217] (X)₀, the intervening peptide sequence is absent;
[0218] (X)₁, comprising for example the sequence L or C, or conserved substitution of L or C;
[0219] (X)₂, comprising for example the sequence LC, or conserved substitution of LC;
[0220] (X)₃, comprising for example the sequence LCC, or conserved substitution of LCC;
[0221] (X)₄, comprising for example the sequence LCCM, or conserved substitutions of LCCM, SLWM or a conserved substitution of SLWM, SFWM or a conserved substitution of SFWM;
[0222] (X)₅, comprising for example the sequence LSLWM, or conserved substitutions of LSLWM, LSLWM or a conserved substitution of LSLWM, LSFWM or a conserved substitution of LSFWM;
[0223] (X)₆, comprising for example the sequence GLSLWM, or conserved substitutions of GLSLWM;
[0224] (X)₇, comprising for example the sequence AGLSLWM, or conserved substitutions of AGLSLWM, or
[0225] (X)₈, comprising for example the sequence MAGLSLWM, or conserved substitutions of MAGLSLWM.

[0226] FIG. 5B shows the fold change of protein accumulation of modified S protein with alternative versions of the C-terminal region with variable margin (intervening peptide sequence) between the SARS-COV-2 transmembrane (TM) domain and H5 A/Indonesia/5/05 HA cytosolic tail (CT) domain, wtTM/H5iCT V1 (SEQ ID NO: 19, product of construct 8980), wtTM/H5iCT V2 (SEQ ID NO: 37, product of construct 8981), wtTM/H5iCT V3 (SEQ ID NO: 38, product of construct #8982) and wtTM/H5iCT V4 (SEQ ID NO: 39, product of construct 8983), when expressed in plants, compared to the protein accumulation of a reference modified S protein wherein the cytoplasmic tail of Coronavirus S-protein has been replaced with the Coronavirus S-protein of H5 A/Indonesia/5/05 HA wtTM/H5iCT (SEQ ID NO: 18, product of construct 8671). All tested modified S proteins showed protein accumulation, with no statistically significant differences between the alternative versions and the wtTM/H5iCT reference control.

[0227] Similarly, a modified S protein comprising a SARS-CoV-1 S protein with a wtTM/H5iCT V4 version of the TMCT (FIG. 16A) or a MERS S protein with a wtTM/H5iCT V4 version of the TMCT (FIG. 19A), when expressed in plants, showed increased protein accumulation compared to protein accumulation of the wild type S proteins (wtTMCT) or S proteins wherein the TMCT has been replaced with the TMCT of H5 A/Indonesia/5/05 HA (H5iTMCT). Furthermore, a OC43 CoV S-protein with a wtTM/H5iCT V4 version of the TMCT when expressed in plants, showed increased protein accumulation compared to protein accumulation of the OC43 CoV S-protein with wild type TMCT (wtTMCT) (FIG. 23 A).

[0228] Accordingly, the modified S protein may comprise a TM and CT domain (TM/CT), wherein the CT or a portion of the CT is fused to the C-terminal end of the TM or portion of the TM via a intervening peptide sequence, wherein the intervening peptide sequence comprises the sequence Xₙ.

[0229] Furthermore, the modified S protein may comprise a TM and CT domain (TM/CT) comprising a sequence having about 70, 75, 80, 85, 87, 90, 91, 92, 93 94, 95, 96, 97, 98, 99, 100% or any amount therebetween sequence identity, or sequence similarity, with the sequence of SEQ ID NO: 18, 19, 37, 38, 39, 64, 126, 127, 128, 129, 130, 131, 118, 119, 120, 123, 124, 125, 134, 135, 164, 165, 166, 169, 170, 171, 172 or 173.

[0230] The modified S protein may comprise a CT or portion of the CT comprising a sequence having about 70, 75, 80, 85, 87, 90, 91, 92, 93 94, 95, 96, 97, 98, 99, 100% or any amount therebetween sequence identity, or sequence similarity, with amino acids 22-37 of SEQ ID NO:18, amino acids 21-40 of SEQ ID NO: 19, amino acids 21-39 of SEQ ID NO: 37, amino acids 25-36 of SEQ ID NO: 38 or amino acids 24-34 of SEQ ID NO: 39, amino acids 22-37 of SEQ ID NO:126, amino acids 22-36 of SEQ ID NO:127, amino acids 22-37 of SEQ ID NO:128, amino acids 22-37 of SEQ ID NO:129, amino acids 22-37 of SEQ ID NO:130, or amino acids 22-37 of SEQ ID NO:131.

[0231] The modified S protein may comprise a TM or portion of the TM comprising a sequence having about 70, 75, 80, 85, 87, 90, 91, 92, 93 94, 95, 96, 97, 98, 99, 100% or any amount therebetween sequence identity, or sequence similarity, with amino acids 1-20 of SEQ ID NO:18, amino acids 1-20 of SEQ ID NO: 19, amino acids 1-20 of SEQ ID NO: 37, amino acids 1-24 of SEQ ID NO: 38, amino acids 1-23 of SEQ ID NO: 39, amino acids 1-21 of SEQ ID NO: 118, amino acids 1-23 of SEQ ID NO: 119, amino acids 1-22 of SEQ ID NO: 123, amino acids 1-24 of SEQ ID NO: 124, amino acids 1-21 of SEQ ID NO: 164, amino acids 1-23 of SEQ ID NO: 165, amino acids 1-20 of SEQ ID NO: 169, or amino acids 1-22 of SEQ ID NO: 170. Furthermore, the modified S protein as described herewith may comprise a TM or portion of TM that comprises from 80% to 100% identity with the sequence of SEQ ID NO: 132 or 133.

[0232] Furthermore, the modified the S-protein may comprise from 70% to 100% sequence identity, or sequence similarity, with the sequence of SEQ ID NO: 5, 59, 60, 61, 62, 95, 96, 97, 108, 109 or 110, for example the modified S protein may comprise a sequence having about 70, 75, 80, 85, 87, 90, 91, 92, 93, 94, 95, 96, 97, 98, 99, 100% or any amount therebetween sequence identity, or sequence similarity, with the sequence of SEQ ID NO: 5, 59, 60, 61, 62, 95, 96, 97, 108, 109 or 110.

[0233] The cytoplasmic tail domain (CT) or portion of the CT of a viral structural protein such as for example a Coronavirus S protein, may be replaced with the CT or portion of the CT from an influenza hemagglutinin (HA) as described below, the resulting protein is referred to as modified viral structural protein. Accordingly, a coronavirus S protein wherein the native CT or portion of the native CT has been replaced with the CT or portion of the CT from HA may be referred to as modified coronavirus S-protein or modified S-protein. As further described above the HA CT or portion of the HA CT may either be directly fused to the N-terminal end of the Coronavirus TM domain or may be fused to the N-terminal end of the Coronavirus TM or portion of the TM via a intervening peptide sequence. Therefore, the HA CT or a portion of a HA CT may be fused to the C-terminal end of the S-protein TM or portion of the S-protein TM via an intervening peptide sequence.

[0234] Influenza “hemagglutinin” or “HA” is a homotrimeric membrane type I glycoprotein, generally comprising a signal peptide, an HA1 domain, and an HA2 domain comprising a membrane-spanning anchor site at the C-terminus and a small cytoplasmic tail (see for example FIG. 1C and FIG. 2). The amino acid sequences of HA from various influenza strains are well known within the art. Furthermore, amino acid sequences and nucleotide sequences encoding HA are well known and are available-see, for example, the BioDefence Public Health base (Influenza Virus; see URL: biohealthbase.org) or National Center for Biotechnology Information (see URL: ncbi.nlm.nih.gov), both of which are incorporated herein by reference. Exemplary amino acid sequences of HA cytoplasmic tail domains from different influenza strains are shown in FIG. 2.

[0235] While different references and groups assign different length to the CT of HA, it has been shown that the N-terminal sequence of the CT is conserved among HA from different influenza subtypes and strains and that at least five residues have sequence identity for at least 10 of 13 HA subtypes (Simpson and Lamb 1992, Journal of Virology, 790-803). FIG. 2 shows an alignment of amino acid sequences from exemplary influenza strains and conserved sequences in the N-terminal part of the HA protein. The consensus sequence of influenza cytoplasmic tail (CT) domain is:

(SEQ ID NO: 15)
XXWMCSNGSXXCXICI (see also FIG. 2, C-terminal end
of SEQ ID NO: 14)

[0236] CT sequences that correspond to the HA cytoplasmic tail domain consensus sequence may be fused to the C-terminal end of the TM of Coronavirus S protein either directly or via an intervening peptide sequence (linker sequence) as discussed above.

[0237] Furthermore, amino acid residues located in N-terminal or C-terminal from the native influenza HA TM/CT boundary may also be included in the CT sequence that is fused either directly or via an intervening peptide sequence to the TM or a portion of the TM of the modified Coronavirus S protein.

[0238] Therefore the sequence of the CT or a portion of the CT may for example start at an amino acid residue that corresponds to any one of amino acids 30-40 of SEQ ID NO: 14. Accordingly, the N-terminal end of the CT sequence may be an amino acid that corresponds to any one of amino acids 30-40 of SEQ ID NOs: 6, 7, 8, 9, 10, 11, 12, 13 or 14. In one example the CT sequence may start at an amino acid residue that corresponds to amino acid 30 in SEQ ID NOs: 6, 7, 8, 9, 10, 11, 12, 13 or 14. In another example, the CT sequence may start at an amino acid residue that corresponds to amino acid 31 of SEQ ID NOs: 6, 7, 8, 9, 10, 11, 12, 13 or 14. In a further example, the CT sequence may start at an amino acid residue that corresponds to amino acid 32 of SEQ ID NOs: 6, 7, 8, 9, 10, 11, 12, 13 or 14. In another example, the CT sequence may start at an amino acid residue that corresponds to amino acid 33 of SEQ ID NOs: 6, 7, 8, 9, 10, 11, 12, 13 or 14. In a further example, the CT sequence may start at an amino acid residue that corresponds to amino acid 34 of SEQ ID NOs: 6, 7, 8, 9, 10, 11, 12, 13 or 14. In another example, the CT sequence may start at an amino acid residue that corresponds to amino acid 35 of SEQ ID NOs: 6, 7, 8, 9, 10, 11, 12, 13 or 14. In a further example, the CT sequence may start at an amino acid residue that corresponds to amino acid 36 of SEQ ID NOs: 6-13 or 14. In another example, the CT sequence may start at an amino acid residue that corresponds to amino acid 37 of SEQ ID NOs: 6, 7, 8, 9, 10, 11, 12, 13 or 14. In a further example, the CT sequence may start at an amino acid residue that corresponds to amino acid 38 of SEQ ID NOs: 6-13 or 14. In another example, the CT sequence may start at an amino acid residue that corresponds to amino acid 39 of SEQ ID NOs: 6, 7, 8, 9, 10, 11, 12, 13 or 14. In a further example, the CT sequence may start at an amino acid residue that corresponds to amino acid 40 of SEQ ID NOs: 6, 7, 8, 9, 10, 11, 12, 13 or 14.

[0239] The cytoplasmic tail (CT) or portion of the CT of the modified S protein may be derived from a CT or portion of the CT of hemagglutinin (HA) of any one influenza type, subtype or strain. For example the CT may be derived from an HA from influenza type A or influenza type B. For example the CT may be derived from an HA of influenza subtype H1, H2, H3, H4, H5, H6, H7, H8, H9, H10, H11, H12, H13, H14, H15, or H16. The CT may for example be derived from a HA of subtype H1, H2, H3, H5, H6, H7 or H9. Furthermore, the CT or portion of the CT may be derived from an HA of influenza type B. The type B influenza may be from the lineage B/Yamagata or B/Victoria.

[0240] For example, the CT or portion of the CT of the modified S protein may be derived from a CT of hemagglutinin (HA) influenza H1, H3, H5, H6, H7, H9 or B strain. Non limiting examples of influenza stains from which the HA CT might be derived are influenza H1 California/7/2009, H2 A/Singapore/1/1957, H3 A/Minnesota/41/2019, H5 A/Indonesia/5/05, H6 A/Teal/Hong Kong/W312/97, H7 A/Guangdong/17SF003/2016, H9 A/Hong Kong/1073/99 or B/Washington/02/2019. Non limiting examples of amino acid sequences of the HA CT are shown in FIG. 2.

[0241] As shown in FIG. 4A, when the native cytoplasmic tail (CT) of SARS-CoV-2 S protein was replaced with the CT from influenza HA H1 California/7/2009 (H1 Calif), H3 A/Minnesota/41/2019 (H3 Minn), H6 A/Teal/Hong Kong/W312/97 (H6 HK), H7 A/Guangdong/17SF003/2016 (H7 Guan), H9 A/Hong Kong/1073/99 (H9 HK) or B/Washington/02/2019 (B Wash), similar fold change in protein accumulation were observed for these modified SARS-CoV-2 S protein, when compared to SARS-CoV-2 S with a CT from H5 A/Indonesia/5/05 (H5 Indo). Western blot analysis confirmed these observations (see FIGS. 4B and 4C).

[0242] Similar results were obtained, when the native cytoplasmic tail (CT) of SARS-CoV-1 S protein, the native CT of MERS S protein, or the native CT of OC43 CoV S protein was replaced with the CT from influenza HA H1 California/7/2009 (H1cCT) (see FIGS. 16A, 19A, and 23A).

[0243] Accordingly, the cytoplasmic tail domain (CT) or portion of the CT may have about 70, 75, 80, 85, 86, 87, 88, 89, 90, 91, 92, 93 94, 95, 96, 97, 98, 99, 100% or any amount therebetween sequence identity, or sequence similarity, with the sequence of SEQ ID NO: 15, or with amino acids 30-50 of SEQ ID NO 6, 7, 8, 9, 10, 12, 13, 14, or with amino acids 31-50 of SEQ ID NO 6, 7, 8, 9, 10, 12, 13, 14, or with amino acids 32-50 of SEQ ID NO 6, 7, 8, 9, 10, 12, 13, 14, or with amino acids 33-50 of SEQ ID NO 6, 7, 8, 9, 10, 12, 13, 14, or with amino acids 34-50 of SEQ ID NO 6, 7, 8, 9, 10, 12, 13, 14, or with amino acids 35-50 of SEQ ID NO 6, 7, 8, 9, 10, 12, 13, 14, or with amino acids 36-50 of SEQ ID NO 6, 7, 8, 9, 10, 12, 13, 14, or with amino acids 37-50 of SEQ ID NO 6, 7, 8, 9, 10, 12, 13, 14, or with amino acids 38-50 of SEQ ID NO 6, 7, 8, 9, 10, 12, 13, 14, or with amino acids 39-50 of SEQ ID NO 6, 7, 8, 9, 10, 12, 13, 14, or with amino acids 40-50 of SEQ ID NO 6, 7, 8, 9, 10, 12, 13, 14, or with amino acids 31-49 of SEQ ID NO 11, or with amino acids 32-49 of SEQ ID NO 11, or with amino acids 33-49 of SEQ ID NO 11, or with amino acids 34-49 of SEQ ID NO 11, or with amino acids 35-49 of SEQ ID NO 11, or with amino acids 36-49 of SEQ ID NO 11, or with amino acids 37-49 of SEQ ID NO 11, or with amino acids 38-49 of SEQ ID NO 11, or with amino acids 39-49 of SEQ ID NO 11, or with amino acids 548-568 of SEQ ID NO:3, or with amino acids 549-568 of SEQ ID NO:3, or with amino acids 550-568 of SEQ ID NO:3, or with amino acids 551-568 of SEQ ID NO:3, or with amino acids 552-568 of SEQ ID NO:3, or with amino acids 553-568 of SEQ ID NO:3, or with amino acids 554-568 of SEQ ID NO:3, or with amino acids 555-568 of SEQ ID NO:3, or with amino acids 556-568 of SEQ ID NO:3, or with amino acids 557-568 of SEQ ID NO:3, or with amino acids 558-568 of SEQ ID NO:3.

[0244] Furthermore, the modified S-protein may comprise from 70% to 100% sequence identity, or sequence similarity, with the sequence of SEQ ID NO: 5, 53, 54, 55, 56, 57 or 58, for example the modified S protein may comprise a sequence having about 70, 75, 80, 85, 87, 90, 91, 92, 93, 94, 95, 96, 97, 98, 99, 100% or any amount therebetween sequence identity, or sequence similarity, with the sequence of SEQ ID NO: 5, 53, 54, 55, 56, 57 or 58 or with amino acids 25-1259 of SEQ ID NO: 53, amino acids 25-1259 of SEQ ID NO: 54, amino acids 25-1259 of SEQ ID NO: 55, amino acids 25-1259 of SEQ ID NO: 56, amino acids 25-1259 of SEQ ID NO: 57 or amino acids 25-1259 of SEQ ID NO: 58.

[0245] In further embodiments, the modified S protein ectodomain and/or transmembrane domain may be obtained from a coronavirus S protein other than SARS-CoV-2 S protein, for example from SARS-CoV-1 S protein, MERS-CoV S protein, OC43-CoV S protein, 229E-CoV S protein and the like.

[0246] As shown in FIG. 16A, higher protein accumulation was observed for modified SARS-CoV-1 S protein with a CT from influenza H5 HA (H5iCT), a CT from influenza H1 HA (H1cCT) or a CT from influenza H5 HA with a variable margin between the SARS-CoV-1 TM and the H5 HA CT (“H5iCT(V4)), when compared to protein accumulation of S protein with a wild-type TMCT (wt TMCT) or a modified S protein with the TMCT of influenza H5 HA (H5i TMCT) from crude plant extract. The modified S-proteins assembled into high molecular weight structures (see FIGS. 16B-16D), which were confirmed to be VLPs (see FIGS. 17A-17C). Although the amount of protein accumulation for SARS-CoV-1 protein with native TMCT was below detection limits of the Western Blot analysis when presented on the same gel with SARS-CoV-1 S-proteins with modified TMCT and/or CT (see FIG. 16A), signals could be detected by Western Blot analysis when only SARS-CoV-1 protein with native TMCT was present on a gel (see FIG. 16B) and VLPs were observed by electron microscopy (see FIG. 17B).

[0247] Similar results were obtained for modified MERS-CoV S protein (see FIG. 19A). Higher protein accumulation was observed for modified MERS-CoV S protein with a CT from influenza H5 HA (H5iCT), a CT from influenza H1 HA (H1cCT) or a CT from influenza H5 HA with a variable margin between the MERS-CoV TM and the H5 HA CT (“H5iCT(V4)), when compared to protein accumulation of S protein with a wild-type TMCT (wt TMCT) or a modified S protein with the TMCT of influenza H5 HA (H5i TMCT) (see protein band at approx. 175 kDa). The highest accumulation was observed for the modified MERS-CoV with an influenza H1 HA CT (H1cCT). The smaller band observed at approx. 100 kDa is most likely a proteolytic cleavage fragment of the S-protein. Without wishing to be bound by theory, it is believed that the replacement of the native CT with an influenza HA CT stabilizes the MERS S-protein and reduces cleavage of the S-protein.

[0248] As further shown in FIG. 23A, low protein yields were observed in plants expressing OC43 CoV S-protein with a native OC43 CoV S-protein TMCT. However, when the native OC43 CoV S-protein TMCT was replaced with a TMCT from influenza H5 HA (H5iTMCT), a CT from influenza H5 HA (H5iCT), a CT from influenza H1 HA (H1cCT) or a CT from influenza H5 HA with a variable margin between the OC43-CoV TM and the H5 HA CT (“H5iCT(V4)) higher protein accumulations were observed compared to the OC43 CoV S-protein with native TMCT (see bands at about 150 kDa. The larger band shown in the gel is believed to be a protein trimer). Similar results were observed with modified 229E-CoV S-protein (data not shown).

[0249] Furthermore, MERS-CoV S-protein, OC43-CoV S-protein, and 229E-CoV S-protein with a TMCT from influenza H5 HA (H5iTMCT), a CT from influenza H5 HA (H5iCT), or a CT from influenza H1 HA were observed to form VLPs as shown in FIGS. 19B-19F, 23B-23E, and 25A-25E.

[0250] The present disclosure therefore provides a “modified viral structural protein”, a “viral structural fusion protein” or a “chimeric viral structural protein”, wherein the ectodomain and the transmembrane domain (TM) of the viral structural protein or a portion of the TM are derived from a Coronavirus and the cytosolic tail (CT) or a portion of the CT is derived from an influenza protein. For example, the ectodomain and the transmembrane domain may be derived from a Coronavirus Spike (S) protein and the cytosolic tail (CT) or a portion of the CT may be derived from influenza HA protein. Modified S protein may comprise, in series i) an ectodomain derived from a coronavirus S-protein (comprising the S1 subunit and the FP, HR1 and HR2 domains of the S2 subunit), ii) a Coronavirus transmembrane domain (TM) or a portion of a Coronavirus TM and iii) an influenza HA cytoplasmic tail domain (CT) or a portion of a HA CT. Therefore, in the modified S protein, the CT or portion of the CT is heterologous to the TM and the ectodomain. Similarly, the TM (and the ectodomain) of the modified S protein are heterologous to the CT. The ectodomain and the transmembrane domain (TM) may be derived from the same Coronavirus (i.e. the ectodomain and the TM may be homologous to each other) or the ectodomain may be derived from a first Coronavirus and the TM may be derived from a second Coronavirus (i.e. the ectodomain and the TM are heterologous to each other).

[0251] By “chimeric protein”, or “chimeric polypeptide”, also referred to as a “fusion protein”, it is meant a protein or polypeptide that comprises amino acid sequences from two or more than two sources, for example but not limited to an ectodomain and a transmembrane domain derived from a first viral structural protein for example derived from Coronavirus S protein and a cytoplasmic tail (CT) derived from a second viral structural protein for example a CT from influenza HA, that are fused as a single polypeptide.

[0252] The modified coronavirus S-protein may comprise a transmembrane and cytosolic tail domain (TMCT), wherein the TMCT is a chimeric TMCT. The chimeric TMCT may comprise a transmembrane domain (TM), wherein the TM or a portion of the TM is derived from a coronavirus S-protein and a cytosolic tail (CT), wherein the CT or a portion of the CT is derived from an influenza hemagglutinin (HA) protein. Furthermore the chimeric TMCT may comprise a native coronavirus S-protein TM, a chimeric coronavirus S-protein/influenza HA TM, a native influenza HA CT, a chimeric influenza HA/coronavirus S-protein CT or a combination thereof. For example, the modified coronavirus S-protein may comprise a chimeric TMCT with a native influenza HA CT and a chimeric TM, wherein the chimeric TM comprises a N-terminal sequence which is derived from the TM of the coronavirus S-protein and a C-terminal sequence which is derived from the TM of influenza HA protein. In another example the modified coronavirus S-protein may comprise a chimeric TMCT with a native coronavirus S-protein TM and a chimeric CT, wherein the chimeric CT comprises a N-terminal sequence derived from the coronavirus S-protein and a C-terminal sequence derived from the influenza HA protein. In a further example, the modified coronavirus S-protein may comprise a chimeric TMCT with a chimeric TM, wherein the chimeric TM comprises a N-terminal sequence which is derived from the TM of the coronavirus S-protein and a C-terminal sequence which is derived from the TM of influenza HA protein and a chimeric CT, wherein the chimeric CT comprises a N-terminal sequence derived from the coronavirus S-protein and a C-terminal sequence derived from the influenza HA protein.

[0253] When referring to a modified S-protein or modified coronavirus spike (S)-protein in the present disclosure, it is meant a modified coronavirus spike (S)-protein comprising a transmembrane domain (TM) or portion of a S-protein TM, and a cytosolic tail (CT) or a portion of a CT, wherein the CT is derived from an influenza hemagglutinin (HA) protein and wherein the TM is heterologous to the CT.

[0254] The modified the S-protein may comprise from 70% to 100% sequence identity, or sequence similarity, with the sequence of SEQ ID NO: 5, 21, 30, 47, 48, 49, 50, 51, 52, 53, 54, 55, 56, 57, 58, 59, 60, 61, 62, 95, 96, 97, 108, 109, 110, 144, 145, 146, 155, 156 or 157, for example the modified S protein may comprise a sequence having about 70, 75, 80, 85, 87, 90, 91, 92, 93, 94, 95, 96, 97, 98, 99, 100% or any amount therebetween sequence identity, or sequence similarity, with the sequence of SEQ ID NO: 5, 21, 30, 47, 48, 49, 50, 51, 52, 53, 54, 55, 56, 57, 58, 59, 60, 61, 62, 95, 96, 97, 108, 109, 110, 144, 145, 146, 155, 156 or 157, or with amino acids 25-1259 of SEQ ID NO: 47, amino acids 25-1259 of SEQ ID NO: 48, amino acids 25-1259 of SEQ ID NO: 49, amino acids 25-1259 of SEQ ID NO: 50, amino acids 25-1259 of SEQ ID NO: 51, amino acids 25-1259 of SEQ ID NO: 52, amino acids 25-1259 of SEQ ID NO: 53, amino acids 25-1259 of SEQ ID NO: 54, amino acids 25-1259 of SEQ ID NO: 55, amino acids 25-1259 of SEQ ID NO: 56, amino acids 25-1259 of SEQ ID NO: 57, amino acids 25-1259 of SEQ ID NO: 58, amino acids 25-1262 of SEQ ID NO: 59, amino acids 25-1261 of SEQ ID NO: 60, amino acids 25-1258 of SEQ ID NO: 61, amino acids 25-1256 of SEQ ID NO: 62, amino acids 25-1243 of SEQ ID NO: 95, amino acids 25-1240 of SEQ ID NO: 96, amino acids 25-1243 of SEQ ID NO: 97, amino acids 25-1341 of SEQ ID NO: 108, amino acids 25-1338 of SEQ ID NO: 109, amino acids 25-1341 of SEQ ID NO: 110, amino acids 25-1351 of SEQ ID NO: 144, amino acids 25-1348 of SEQ ID NO: 145, amino acids 25-1351 of SEQ ID NO: 146, amino acids 25-1159 of SEQ ID NO: 155, amino acids 25-1156 of SEQ ID NO: 156, or amino acids 25-1159 of SEQ ID NO: 157.

[0255] The modified S-protein may further be produced or synthesized as modified S-protein precursor (also referred to as precursor S-protein), wherein the S-protein precursor comprises the modified S-protein and a signal peptide, wherein the signal peptide is native to Coronavirus (i.e. homologues to the ectodomain) or the signal peptide might be non-native or heterologous to the ectodomain. In a non-limiting example, the native signal peptide may be replaced with the signal peptide from protein disulfide isomerase (PDI).

[0256] The modified S-protein precursor may comprise a signal peptide that is non-native or heterologous to the ectodomain. The non-native signal peptide may replace the entire native signal peptide or may replace a portion of the native signal peptide of the Coronavirus S protein. Furthermore, the non-native or heterologous signal peptide may be directly fused to the N-terminus of the modified S protein or the non-native or heterologous signal peptide may be fused to the N-terminus of the modified S protein with an intervening peptide sequence.

[0257] A signal peptide (also referred to as signal sequence, targeting signal, localization signal, localization sequence, transit peptide, leader sequence or leader peptide) is a short peptide present at the N-terminus of the majority of newly synthesized proteins that are destined toward the secretory pathway. The signal peptide is responsible for targeting proteins to the endomembrane system, including the endoplasmic reticulum and the Golgi apparatus, where it is co-translationally removed by a signal peptidase located within the ER lumen and the mature proteins are generated. Since experimental methods for identification of targeting sequences are time-consuming and laborious, different computational approaches predicting targeting signals were developed, and are well known within the art. Signal peptides generally have low sequence similarity, but share some characteristic features. For predicting the signal sequence and its cleavage site, many prediction methods have been developed which take these characteristic features into account, such for example SignalP (Bendtsen et al., J Mol Biol. 2004 Jul. 16; 340(4):783-95.; Petersen et al., Nature Methods volume 8, pages 785-786(2011), Signal-CF (Chou and Shen, Biochem Biophys Res Commun. 2007 Jun. 8; 357(3):633-40), and Signal-BLAST (Frank and Sippl, Bioinformatics, 2008 Oct. 1; 24(19):2172-6), which are herewith incorporated by reference.

[0258] Using the SignalP prediction program, a signal peptide cleavage site for the SARS-CoV-2 S protein is predicted between position 15 and 16 of the sequence corresponding to the sequence of SEQ ID NO:1. However, a signal peptide cleavage site for the SARS-CoV-2 S protein may be predicted or occur between other consecutive positions of the sequence corresponding to the sequence of SEQ ID NO:1. For example, a signal peptide cleavage site for the SARS-CoV-2 S protein may also be predicted or may occur between position 13 and 14 of the sequence corresponding to the sequence of SEQ ID NO:1.

[0259] The N-terminal region of the native SARS-CoV-2 S protein (including the native signal peptide sequence) is shown below:

(SEQ ID NO: 63)
MFVFLVLLPLV [symbol] QLPPAYTNS

[0260] A predicted signal peptide sequence (SP) is underlined. The sequence shaded in grey corresponds to the sequence depicted in Table 2. The first amino acid residue of the mature SARS-CoV-2 S protein may be Valine (V) with its position designated as 1 (+1), which corresponds to V16 of the precursor S protein (native SARS-CoV-2 S protein with the native signal peptide). The first amino acid residue of the mature SARS-CoV-2 S protein may be at other residues of SEQ ID NO:1 or SEQ ID NO: 63 as indicated in Table 2. For example, the first amino acid residue of the mature SARS-CoV-2 S protein may be Glutamine (Q) with its position designated as 14 (-2).

TABLE 2
Portion of the SARS-CoV-2 S-protein sequence surrounding a signal
peptide (SP) cleavage site. Numbering of residues is either
from the N-terminus that includes the native signal peptide
(# with SP) or from a predicted cleavage site at position
V1 (# without SP), which is equivalent to V16 in the
sequence that includes the signal peptide (precursor S protein).

| | S | S | Q | C | V | N | L | T | T | R | T |
|---|---|---|---|---|---|---|---|---|---|---|---|
| #_with_SP | 12 | 13 | 14 | 15 | 16 | 17 | 18 | 19 | 20 | 21 | 22 |
| #_without_SP* | −4 | −3 | −2 | −1 | 1 | 2 | 3 | 4 | 5 | 6 | 7 |

*mature protein

[0261] Signal peptides or peptide sequences for directing localization of an expressed protein or polypeptide to the apoplast include, but are not limited to, a native (with respect to the protein) signal or leader sequence, or a heterologous signal sequence, for example but not limited to, a rice amylase signal peptide (McCormick 1999, Proc Natl Acad Sci USA 96:703-708) or a protein disulfide isomerase signal peptide (PDI). Therefore, as described herein, the modified S protein may be produced as precursor protein comprising a modified S-protein and a heterologous amino acid signal peptide sequence. For example, the modified S protein precursor may comprise the signal peptide from Protein disulphide isomerase (PDI SP; nucleotides 32-103 of Accession No. Z11499).

[0262] The present disclosure therefore also provides for a modified S protein precursor comprising a modified S-protein and a native, or a non-native signal peptide, and nucleic acids encoding such protein.

[0263] The modified viral structural protein may be a modified S protein, wherein the modified S protein is a monomeric or single chain modified S protein. The monomeric or single chain modified S protein may include an S1 domain (subunit) and an S2 domain (subunit), wherein the S2 domain (subunit) has been modified to replace the native CT of the S protein with the CT of influenza HA protein and wherein the modified S protein is a single contiguous polypeptide chain. Monomeric or single chain modified S protein may trimerize to form a trimer, referred to as a trimeric modified S protein. A trimer is a macromolecular complex formed by three, usually non-covalently bound proteins.

[0264] The S protein is cleaved at a conserved activation cleavage site into 2 polypeptide chains, the S1 subunit and S2 subunit, which remain associated as S1/S2 protomers within the homotrimer. Without wishing to be bound by theory, the cleavage of the S protein into subunits may be important for virus infectivity, but it may not be essential for the trimerization of the protein.

[0265] The modified S protein may further comprise one or more than one substitution, replacement or mutation. For example, the modified S protein may comprise one or more than one substitution, replacement or mutation in the ectodomain to increase expression, yield, stability or to increase expression, yield and stability of the modified S protein in a suitable expression system.

[0266] For example the modified S protein, may comprise substitutions or mutations to the S1/S2 and/or S2′ protease cleavage sites to prevent protease cleavage at these sites. Therefore, when produced in a host or host cells, the modified S protein is not cleaved into separate S1 and S2 subunits or polypeptide chains.

[0267] The modified viral structural protein, such as the modified S protein, may further assemble into trimers of modified viral structural protein. It is therefore further provided a Coronavirus protein trimer comprising the modified S protein as described herein. The trimer may comprise single chain modified S protein wherein the single chain modified S protein comprises an S1 subunit and an S2 subunit, wherein the CT of the S2 subunit has been replaced with the CT of influenza hemagglutinin (HA).

[0268] The trimer may further be stabilized in a prefusion conformation. The modified viral structural protein, such as the modified S protein, therefore may further comprise one or more than one substitution, replacement or mutation to inhibit a conformational change in the S protein from the prefusion conformation to the post-fusion conformation, and thereby stabilizing the S protein or S protein trimer in the prefusion conformation.

[0269] By “amino acid substitution” or “substitution” it is meant the replacement of an amino acid in the amino acid sequence of a protein with a different amino acid. The terms amino acid, amino acid residue or residue are used interchangeably in the disclosure. One or more amino acids may be replaced with or substituted with one or more amino acids that are different than the original or wild-type amino acid at this position, without changing the overall length of the amino acid sequence of the protein.

[0270] For example, the modified viral structural protein, such as the modified S protein may be stabilized by proline substitutions, substitutions allowing the formation of disulfide bonds and salt bridges, and/or cavity-filling substitutions.

[0271] Hsieh et al. (Science 2020, 369 p. 1501-1505 which is incorporated herein by reference) designed and expressed a variety of SARS-CoV-2 spike protein variants in mammalian cells. An S protein variant with six proline substitutions, referred to as HexaPro, expressed 9.8× higher than S protein compared to variant that only had a double proline substitutions, had ˜5° C. increase in Tm, and retained the trimeric prefusion conformation in mammalian cell lines. The HexaPro variant is considered the best variant by Hsieh et al.

[0272] In the current disclosure, the highest yields were observed with combinations of four proline substitutions corresponding to positions 802, 927, 971 and 972 (“4P”) of SEQ ID NO: 2 and an additional single amino acid substitution at position 923. Furthermore, higher yields were also observed with combinations of six proline substitutions corresponding to positions 802, 877, 884, 927, 971 and 972 (“6P”) and an additional single amino acid substitution at position 923.

[0273] As provided herewith, the modified S protein may further comprise one or more than one substitution, replacement or mutation to increase stability, yield or stability and yield of the modified protein in a host or cost cell, such for example in a plant or plant cells.

[0274] The modified S protein as described herein may comprise one or more than one mutation, modification, or substitution in its amino acid sequence at any one or more amino acid that corresponds to an amino acid within a reference sequence as described below.

[0275] By “correspond to an amino acid”, “corresponding to an amino acid” “or “corresponding to the sequence” and the like, it is meant that an amino acid (or nucleotide) corresponds to an amino acids (or nucleotide) in a sequence alignment with a reference Coronavirus sequence as described below. The corresponding amino acid positions in Coronavirus sequence may be determined by alignment to known sequences of Coronavirus S protein. Methods of alignment of sequences for comparison are well-known in the art and are further described below. Examples of corresponding amino acids are shown in Table 3.

TABLE 3
Positions of corresponding amino acid/residue position in Coronavirus
S-proteins. (Reference sequences are indicated).

| | Amino acid position in S-protein (with ref. to indicated sequence) | | | | | | | | |
|---|---|---|---|---|---|---|---|---|---|
| SARS-CoV-2¹ | 667 | 668 | 670 | 802 | 877 | 884 | 927 | 971 | 972 |
| (SEQ ID NO: 2) | | | | | | | | | |
| SARS-CoV-2² | 682 | 683 | 685 | 817 | 892 | 899 | 942 | 986 | 987 |
| (SEQ ID NO: 1) | | | | | | | | | |
| SARS-CoV-1¹ | 651 | 652 | 654 | 786 | 861 | 868 | 911 | 955 | 956 |
| (SEQ ID NO: 114) | | | | | | | | | |
| SARS-CoV-1² | 664 | 665 | 667 | 799 | 874 | 881 | 924 | 968 | 969 |
| (SEQ ID NO: 112) | | | | | | | | | |
| MERS-CoV¹ | 730 | 731 | 733 | 872 | 949 | 956 | 999 | 1043 | 1044 |
| (SEQ ID NO: 115) | | | | | | | | | |
| MERS-CoV² | 747 | 748 | 750 | 889 | 966 | 973 | 1016 | 1060 | 1061 |
| (SEQ ID NO: 113) | | | | | | | | | |
| OC43-CoV¹ | 748 | 749 | 751 | 898 | N/A | 976 | 1019 | 1063 | 1064 |
| (SEQ ID NO: 160) | | | | | | | | | |
| OC43-CoV² | 762 | 763 | 765 | 912 | N/A | 990 | 1033 | 1077 | 1078 |
| (SEQ ID NO: 158) | | | | | | | | | |
| 229E-CoV¹ | 551 | 552 | 554 | 675 | N/A | 754 | 811 | 855 | 856 |
| (SEQ ID NO: 161) | | | | | | | | | |
| 229E-CoV² | 567 | 568 | 570 | 691 | N/A | 770 | 827 | 871 | 872 |
| (SEQ ID NO: 159) | | | | | | | | | |

¹numbering excludes signal peptide (SP)
²numbering includes signal peptide (SP)

[0276] For example, the modified S protein may have one or more than one (for example two consecutive) proline substitutions at or near the boundary between a HR1 domain and a central helix domain that stabilize the S ectodomain trimer in the prefusion conformation, as described for example in WO 2018/081318, which is herein incorporated by reference. Furthermore, the one or more than one substitution may restrict and/or may prevent the processing or cleavage at the cleavage site between the S1 and the S2 subunit.

[0277] The modified S protein may comprise one or more than one substitution at a position as indicated in Table 3. For example the modified S protein may comprise one or more than one substitution at a position that corresponds to position 667, 668, 670, 802, 877, 884, 923, 927, 971, 972, or a combination thereof in reference sequence of SEQ ID NO: 2 (SARS-CoV-2). Corresponding positions in S-proteins of SARS-CoV-1, MERS-CoV, OC43-CoV and 229E-CoV are indicated in Table 3. Corresponding amino acid positions in S-protein from other Coronavirus may be determined by methods know within the art.

### GSAS-2P (971 and 972)

[0278] For example, the modified S protein may have one or more than one substitution at one or more than one amino acid corresponding to amino acid at positions 667, 668, 670, 971 or 972 of amino acid sequence of SEQ ID NO: 2.

[0279] In one aspect, the modified S protein may comprise a substitution, modification or mutation, corresponding to positions 667, 668, 670 or a combination thereof (numbering in accordance with SEQ ID NO: 2). For example, the amino acid corresponding to position 667 may be substituted for glycine (G) or a conserved substitution of glycine (G), the amino acid corresponding to position 668 may be substituted for serine (S) or a conserved substitution of serine (S), and the amino acid corresponding to position 670 may be substituted for serine (S) or a conserved substitution of serine (S).

[0280] The modified S protein may further comprise a substitution, modification or mutation, corresponding to positions 971, 972 or at positions 971 and 972 (numbering in accordance with SEQ ID NO: 2). For example, the amino acid corresponding to position 971 and/or 972 may be substituted for proline (P) or a conserved substitution of proline (P).

[0281] The modified S protein may comprise one or more than one substitution wherein the one or more than one substitutions comprise or consist of one or more than one substitution of an amino acid corresponding to amino acid at positions 667, 668, 670, 971, 972 of SEQ ID NO: 2. The modified S protein with one or more than one substitutions may be stabilized in a prefusion confirmation. Furthermore, the modified S protein may form trimer that are stabilized in a prefusion confirmation.

[0282] For example, the modified S protein may comprise the following substitutions (numbering in accordance with SEQ ID NO: 2): R667G, R668S, R670S (herein referred to as “GSAS”). The modified S protein may also have the following substitutions (numbering in accordance with SEQ ID NO: 2): K971P and V972P (herein referred to as “2P”). Furthermore the modified S protein may have the following substitutions (numbering in accordance with SEQ ID NO: 2): R667G, R668S, R670S, K971P and V972P (herein referred to as “GSAS-2P”).

[0283] For example the modified S protein may have an amino acid sequence that has about 70, 75, 80, 85, 87, 90, 91, 92, 93 94, 95, 96, 97, 98, 99, 100% or any amount therebetween, sequence identity, or sequence similarity, with the amino acid sequence of SEQ ID NO: 47 sequence or with amino acids 25-1259 of SEQ ID NO: 47, wherein the amino acid sequence has glycine (G) or a conserved substitution of glycine (G) at position 667, serine (S) or a conserved substitution of serine (S) at position 668, serine (S) or a conserved substitution of serine (S) at position 670, proline (P) or a conserved substitution of proline (P) at positions 971 and 972, wherein the modified S protein, when expressed, forms VLP.

[0284] In another example, the modified S protein may have one or more than one substitution at one or more than one amino acid corresponding to amino acid at positions 654, 955 or 956 of amino acid sequence of SEQ ID NO: 114 or at positions 730, 733, 1043 or 1044 of amino acid sequence of SEQ ID NO: 115.

[0285] For example, the modified S protein may comprise the following substitutions: R654A (numbering in accordance with SEQ ID NO: 114) or R730A and/or R733G (numbering in accordance with SEQ ID NO: 115). The modified S protein may also have the following substitutions: K955P and/or V956P (numbering in accordance with SEQ ID NO: 114) or V1043P and/or L1044P (numbering in accordance with SEQ ID NO: 115). Furthermore the modified S protein may have the following substitutions: R654A, K955P and V956P (numbering in accordance with SEQ ID NO: 114) or R730A, R733G, V1043P, L1044P (numbering in accordance with SEQ ID NO: 115).

### GSAS-4P (802, 927, 971 and 972)

[0286] The modified S protein may further have substitution at amino acids corresponding to amino acid at positions 667, 668, and 670 and further one or more than one substitution at one or more than one residue corresponding to positions 802, 927, 971 and 972 (numbering in accordance with SEQ ID NO: 2). For example, the amino acid corresponding to positions 802, 927, 971 and 972 may be substituted for proline (P) or a conserved substitution of proline (P).

[0287] As shown in FIG. 11A, modified S protein having the “GSAS” modifications and the following modifications: F802P, A927P, K971P, V972P (referred to as “GSAS-4P”, expressed from construct 8953) showed an increase of 2.47-fold increase in yield of modified S protein when compared to the yield of the “GSAS-2P” S protein (expressed from construct 8671).

[0288] Accordingly, the modified S protein may comprise one or more than one substitution wherein the one or more than one substitution comprise or consist of one or more than one substitution of an amino acid corresponding to amino acid at positions 667, 668, 670, 802, 927, 971 and 972 of SEQ ID NO: 2.

[0289] For example the modified S protein may have an amino acid sequence that has about 70, 75, 80, 85, 87, 90, 91, 92, 93 94, 95, 96, 97, 98, 99, 100% or any amount therebetween, sequence identity, or sequence similarity, with the amino acid sequence of SEQ ID NO: 48 or with amino acids 25-1259 of SEQ ID NO: 48, wherein the amino acid sequence has glycine (G) or a conserved substitution of glycine (G) at position 667, serine (S) or a conserved substitution of serine (S) at position 668, serine (S) or a conserved substitution of serine (S) at position 670, proline (P) or a conserved substitution of proline (P) at positions 802, 927, 971 and 972, wherein the modified S protein, when expressed, forms VLP.

[0290] In another example, the modified S protein may have one or more than one substitution at one or more than one amino acid corresponding to amino acid at positions 654, 786, 911, 955 or 956 of amino acid sequence of SEQ ID NO: 114 or at positions 730, 733, 872, 999, 1043 or 1044 of amino acid sequence of SEQ ID NO: 115.

[0291] For example, the modified S protein may comprise the following substitutions: R654A (numbering in accordance with SEQ ID NO: 114) or R730A and/or R733G (numbering in accordance with SEQ ID NO: 115). The modified S protein may also have the following substitutions: F786P, S911P, K955P and/or V956P (numbering in accordance with SEQ ID NO: 114) or A872P, N999P, V1043P and/or L1044P (numbering in accordance with SEQ ID NO: 115). Furthermore the modified S protein may have the following substitutions: R654A, F786P, S911P, K955P and V956P (numbering in accordance with SEQ ID NO: 114) or R730A, R733G, A872P, N999P, V1043P, L1044P (numbering in accordance with SEQ ID NO: 115).

### GSAS-6P (802, 877, 884, 927, 971 and 972)

[0292] The modified S protein may further have substitution at amino acids corresponding to amino acid at positions 667, 668, and 670 and further one or more than one substitution at one or more than one residue corresponding to positions 802, 877, 884, 927, 971, and 972 (numbering in accordance with SEQ ID NO: 2). For example, the amino acid corresponding to position 802, 877, 884, 927, 971, and 972 may be substituted for proline (P) or a conserved substitution of proline (P) (numbering in accordance with SEQ ID NO: 2).

[0293] As shown in FIG. 11A, modified S protein having the “GSAS” modifications and the following modifications: F802P, A877P, A884P, A927P, K971P, V972P (referred to as “GSAS-6P”, expressed from construct 8940) showed an increase of 2.11-fold increase in yield of S protein when compared to the yield of the “GSAS-2P” S protein (expressed from construct 8671).

[0294] Accordingly, the modified S protein may comprise one or more than one substitution wherein the one or more than one substitution comprise or consist of one or more than one substitution of an amino acid corresponding to amino acid at positions 667, 668, 670, 802, 877, 884, 927, 971 and 972 of SEQ ID NO: 2.

[0295] For example the modified S protein may have an amino acid sequence that has about 70, 75, 80, 85, 87, 90, 91, 92, 93 94, 95, 96, 97, 98, 99, 100% or any amount therebetween, sequence identity, or sequence similarity, with the amino acid sequence of SEQ ID NO: 49 or with amino acids 25-1259 of SEQ ID NO: 48, wherein the amino acid sequence has glycine (G) or a conserved substitution of glycine (G) at position 667, serine (S) or a conserved substitution of serine (S) at position 668, serine (S) or a conserved substitution of serine (S) at position 670, proline (P) or a conserved substitution of proline (P) at position 802, 802, 877, 884, 927, 971 and 972, wherein the modified S protein when expressed forms VLP.

[0296] In another example, the modified S protein may have one or more than one substitution at one or more than one amino acid corresponding to amino acid at positions 654, 786, 861, 868, 911, 955 or 956 of amino acid sequence of SEQ ID NO: 114 or at positions 730, 733, 872, 949, 956, 999, 1043 or 1044 of amino acid sequence of SEQ ID NO: 115.

[0297] For example, the modified S protein may comprise the following substitutions: R654A (numbering in accordance with SEQ ID NO: 114) or R730A and/or R733G (numbering in accordance with SEQ ID NO: 115). The modified S protein may also have the following substitutions: F786P, A861P, A868P, S911P, K955P and/or V956P (numbering in accordance with SEQ ID NO: 114) or A872P, S949P, A956P, N999P, V1043P and/or L1044P (numbering in accordance with SEQ ID NO: 115). Furthermore the modified S protein may have the following substitutions: R654A, F786P, A861P, A868P, S911P, K955P and V956P (numbering in accordance with SEQ ID NO: 114) or R730A, R733G, A872P, S949P, A956P, N999P, V1043P and L1044P (numbering in accordance with SEQ ID NO: 115).

### Substitution at Position 923

[0298] The modified S protein as described herewith may further comprise a substitution, modification, or mutation, corresponding to position 923 (numbering in accordance with SEQ ID NO: 2). For example the amino acid corresponding to position 923 may be substituted for phenylalanine (F) or a conserved substitution of phenylalanine (F).

[0299] As shown in FIG. 11B, modified S protein having the “GSAS-2P” modifications and a L923F substitution (expressed from construct 8933) showed an increase of 1.36-fold yield of S protein when compared to the yield of the “GSAS-2P” S protein without the L923F substitution (expressed from construct 8671). The modified S protein having the “GSAS-4P” modifications and a L923F substitution (expressed from construct 8960) showed an increase of 2.88-fold in yield of the modified S protein when compared to the yield of the “GSAS-2P” S protein without the L923F substitution (expressed from construct 8671). The modified S protein having the “GSAS-6P” modifications and a L923F substitution (expressed from construct 8947) showed an increase of 2.47-fold in yield when compared to the yield of the “GSAS-2P” S protein without the L923F substitution (expressed from construct 8671).

[0300] Accordingly, the modified S protein may comprise one or more than one substitution wherein the one or more than one substitution comprises or consists of one or more than one substitution of an amino acid corresponding to amino acids at positions 667, 668, 670, 927, 971, 972, 802, 877, 884, 923 or a combination thereof of SEQ ID NO: 2. For example the modified S-protein may comprise one or more than one substitution wherein the one or more than one substitution comprises or consists of one or more than one substitution of an amino acid corresponding to amino acids at positions 667, 668, 670, 971, 972, 923, or a combination thereof of SEQ ID NO: 2 (GSAS-2P-923), 667, 668, 670, 927, 971, 972, 802 923, or a combination thereof of SEQ ID NO: 2 (GSAS-4P-923) or 667, 668, 670, 927, 971, 972, 802, 877, 884, 923 or a combination thereof of SEQ ID NO: 2 of SEQ ID NO: 2 (GSAS-6P-923).

[0301] For example, the modified S protein may comprise one or more than one substitution wherein the one or more than one substitution comprises or consists of one or more than one substitution of an amino acid corresponding to amino acids at positions
[0302] 667, 668, 670, 971, 972 and 923 of SEQ ID NO: 2 (GSAS-2P-923),
[0303] 667, 668, 670, 927, 971, 972, 802 and 923 of SEQ ID NO: 2 (GSAS-4P-923) or
[0304] 667, 668, 670, 927, 971, 972, 802, 877, 884 and 923 of SEQ ID NO: 2 (GSAS-6P-923).

[0305] For example, the modified S protein may have an amino acid sequence that has about 70, 75, 80, 85, 87, 90, 91, 92, 93 94, 95, 96, 97, 98, 99, 100% or any amount therebetween, sequence identity, or sequence similarity, with the amino acid sequence of SEQ ID NO: 50 or amino acids 25-1259 of SEQ ID NO: 50, wherein the amino acid sequence has glycine (G) or a conserved substitution of glycine (G) at position 667, serine (S) or a conserved substitution of serine (S) at positions 668 and 670, proline (P) or a conserved substitution of proline (P) at positions 971 and 972, and phenylalanine (F) or a conserved substitution of phenylalanine (F) at position 923; SEQ ID NO: 51 or amino acids 25-1259 of SEQ ID NO: 51, wherein the amino acid sequence has glycine (G) or a conserved substitution of glycine (G) at position 667, serine (S) or a conserved substitution of serine (S) at positions 668 and 670, proline (P) or a conserved substitution of proline (P) at positions 927, 971, 972 and 802, and phenylalanine (F) or a conserved substitution of phenylalanine (F) at position 923; or SEQ ID NO: 52 or amino acids 25-1259 of SEQ ID NO: 52, wherein the amino acid sequence has glycine (G) or a conserved substitution of glycine (G) at position 667, serine (S) or a conserved substitution of serine (S) at positions 668 and 670, proline (P) or a conserved substitution of proline (P) at positions 927, 971, 972, 802, 877 and 884, and phenylalanine (F) or a conserved substitution of phenylalanine (F) at position 923, wherein the modified S protein when expressed forms VLP.

[0306] Accordingly, it is provided a modified coronavirus S-protein which may comprise:
[0307] 1. a chimeric transmembrane and cytoplasmic tail domain (TMCT);
[0308] 2. one or more than one substitution corresponding to amino acid at positions 667, 668, and/or 670 (numbering in accordance with SEQ ID NO: 2) when compared to a corresponding wildtype coronavirus S-protein;
[0309] 3. one or more than one substitution corresponding to amino acid at positions 802, 877, 884, 927, 971, and/or 972 (numbering in accordance with SEQ ID NO: 2) when compared to a corresponding wildtype coronavirus S-protein;
[0310] 4. a substitution corresponding to position 923 (numbering in accordance with SEQ ID NO: 2) when compared to a corresponding wildtype coronavirus S-protein;
[0311] 5. or a combination of the modifications and/or substitutions as described under 1-4.

[0312] As used herein, the term “conserved substitution” or “conservative substitution” and grammatical variations thereof, refers to an amino acid that is different from an reference amino acid (substitution), but is in the same class of amino acid as the described substitution or described residue (i.e., a nonpolar residue replacing a nonpolar residue, an aromatic residue replacing an aromatic residue, a polar-uncharged residue replacing a polar-uncharged residue, a charged residue replacing a charged residue). Further information about conservative substitutions can be found, for instance, in Sahin-Toth et al. (Protein ScL, 3:240-247, 1994), Hochuli et al (Bio/Technology, 6:1321-1325, 1988) Henikoff S, and Henikoff JG (Proc. Natl. Acad. Sci. USA 89: 10915-10919, 1992) and in widely used textbooks of genetics and molecular biology.

[0313] The modified viral structural protein may further be glycosylated. Coronavirus S protein, Coronavirus M protein and Coronavirus E protein are glycosylated and both N-linked glycosylation and O-linked glycosylation occur.

[0314] The modified viral structural protein may comprise glycosylation pattern that are unique to the host or host cell in which the modified viral structural protein is expressed. For example, when expressed in plants or plant cells, the modified viral structural protein may comprise plant-specific N-glycans. Therefore, it is also provided modified viral structural protein having plant specific N-glycans.

[0315] As described herein, the cytosolic tail domain (CT) of the modified viral structural protein may be replaced with the CT from influenza hemagglutinin (HA). The ectodomain and the transmembrane domain (TM) of the viral structural protein as described above are fused to an influenza HA cytosolic tail domain (CT) such that the CT is heterologous with respect to the ectodomain and the transmembrane domain of the viral structural protein, such as the S protein. The modified S protein may self-assemble into virus-like particles (VLPs).

[0316] The present description therefore further relates to virus-like particles (VLPs). More specifically, the present description is directed to VLPs comprising modified viral structural proteins such as modified S-protein, and methods of producing VLPs with modified viral structural proteins such as modified S-protein in a host or host cell. The VLPs comprise a modified viral structural protein such as modified S-protein as described herewith.

[0317] As shown in FIGS. 6C, 17A, 17B, and 17C, modified viral structural protein as exemplified by a modified S protein (modified SARS-CoV-2 or modified SARS-CoV-1 S protein), wherein the native or wild-type CT has been replaced by a CT from influenza HA protein self-assemble into VLPs when expressed in plants. The VLPs are similar to VLPs produced with a S protein with native TM/CT sequence (see FIGS. 6A and 17A) or modified S protein with H5 influenza TM/CT sequence (see FIGS. 6B and 17B) in the same plant expression system.

[0318] Furthermore, as shown in FIGS. 6D, 6E, 6F and 6G, modified S protein with variable margin or boundaries (intervening peptide sequence) between the TM and influenza CT domain also self-assemble into VLPs when expressed in plants.

[0319] In addition, as shown in FIGS. 6H, 6I, 6J, 6K, 6L and 6M, modified S protein, wherein the native or wild-type CT has been replaced by a CT from influenza HA protein from H1, H3, H6, H7, H9 and B influenza, respectively, also self-assemble into VLPs when expressed in plants.

[0320] Furthermore, as shown in FIGS. 19B-19F, 23B-23E, and 25A-25E, modified S-protein derived from MERS-CoV, OC43-CoV, and 229E-CoV, wherein the modified S-protein has a TMCT from influenza H5 HA (H5iTMCT), a CT from influenza H5 HA (H5iCT), or a CT from influenza H1 HA also formed VLPs.

[0321] The term virus-like particle” (VLP), or “virus-like particles” or “VLPs” refers to virus-like structures that are generally morphologically and antigenically similar to virions produced in an infection, but lack genetic information sufficient to replicate and thus are non-infectious. VLPs are structures that self-assemble and comprise one or more structural proteins such as for example modified viral structural proteins, for example but not limited to a modified S protein. Therefore, the VLP may comprise modified S protein. The VLP may further comprise viral structural proteins, wherein the viral structural proteins consist of modified S protein. Therefore, in some embodiments the VLP may lack or be free of the Coronavirus M protein and/or Coronavirus E protein. In some embodiments the VLPs produced from the modified viral structural protein as described herewith, therefore do not comprise a Coronavirus M protein, a Coronavirus E protein or Coronavirus M protein and Coronavirus E protein. Furthermore, in some embodiment the VLP do not comprise structural or non-structural proteins from viruses that are heterologous to Coronaviridae or influenza virus, for example the VLP do not comprise structural and non-structural protein from viruses that are not from Coronaviridae.

[0322] In another embodiment the VLP may comprise Coronavirus E protein, Coronavirus M protein and modified Coronavirus S protein. In another embodiment the VLP may comprise Coronavirus E protein and modified Coronavirus S protein. In another embodiment the VLP may comprise Coronavirus M protein and modified Coronavirus S protein. Furthermore, the VLP may comprise Coronavirus E protein, modified Coronavirus M protein and modified Coronavirus S protein. The VLP may further comprise modified Coronavirus E protein, modified Coronavirus M protein and modified Coronavirus S protein. In another embodiment the VLP may comprise modified Coronavirus E protein and modified Coronavirus S protein. In another embodiment the VLP may comprise modified Coronavirus M protein and modified Coronavirus S protein.

[0323] VLPs may be produced in suitable host or host cells including plants and plant cells. Following extraction from the host or host cell and upon isolation and further purification under suitable conditions, VLPs may be recovered as intact structures.

[0324] The VLPs may be purified or extracted using any suitable method for example chemical or biochemical extraction. VLPs are relatively sensitive to desiccation, heat, pH, surfactants and detergents. Therefore it may be useful to use methods that maximize yields, minimize contamination of the VLP fraction with cellular proteins, maintain the integrity of the proteins, or VLPs, and, where required, the associated lipid envelope or membrane, methods of loosening the cell wall to release the proteins, or VLP. Minimizing or eliminating the use of detergence or surfactants such for example SDS or Triton™ X-100 may be beneficial for improving the yield of VLP extraction. VLPs may be then assessed for structure and size by, for example, electron microscopy (see FIG. 4B), or by size exclusion chromatography.

[0325] For enveloped viruses, such as Coronavirus, it may be advantageous for a lipid layer or membrane to be retained by the virus. The composition of the lipid may vary with the system (e.g. a plant-produced enveloped virus would include plant lipids or phytosterols in the envelope), and may contribute to an improved immune response.

[0326] Therefore, the VLPs that are produced in a host or host cell, may comprise lipids from the plasma membrane of the host or host cell. For example VLPs produced in plants may contain lipids of plant origin (“plant lipids”), VLPs produced in insect cells may comprise lipids from the plasma membrane of insect cells (generally referred to as “insect lipids”), and VLPs produced in mammalian cells may comprise lipids from the plasma membrane of mammalian cells (generally referred to as “mammalian lipids”).

[0327] The plant lipids or plant-derived lipids may be in the form of a lipid bilayer, and may further comprise an envelope surrounding the VLP. The plant-derived lipids may comprise lipid components of the plasma membrane of the plant where the VLP is produced, including phospholipids, tri-, di- and monoglycerides, as well as fat-soluble sterol or metabolites comprising sterols. Examples include phosphatidylcholine (PC), phosphatidylethanolamine (PE), phosphatidylinositol, phosphatidylserine, glycosphingolipids, phytosterols or a combination thereof. Examples of phytosterols include campesterol, stigmasterol, ergosterol, brassicasterol, delta-7-stigmasterol, delta-7-avenasterol, daunosterol, sitosterol, 24-methylcholesterol, cholesterol or beta-sitosterol. As one of skill in the art would understand, the lipid composition of the plasma membrane of a cell may vary with the culture or growth conditions of the cell or organism, or species, from which the cell is obtained. Generally, beta-sitosterol is the most abundant phytosterol.

[0328] Without wishing to be bound by theory, plant-made VLPs comprising plant derived lipids, may induce a stronger immune reaction than VLPs made in other manufacturing systems and the immune reaction induced by these plant-made VLPs may be stronger when compared to the immune reaction induced by live or attenuated whole virus vaccines.

[0329] Furthermore, in addition to the potential adjuvant effect of the presence of plant lipids, the ability of plant N-glycans to facilitate the capture of glycoprotein antigens by antigen presenting cells, may be advantageous of the production of VLPs in plants.

[0330] The VLP produced within a plant may comprise a modified viral structural protein comprising plant-specific N-glycans. Therefore, this disclosure also provides for a VLP comprising modified viral structural protein having plant specific N-glycans. Furthermore, it is provided VLP comprising plant lipids and modified viral structural protein having plant specific N-glycans.

[0331] Methods of producing virus like particle (VLP) comprising modified structural protein in a host or host cell are also provided. Furthermore, methods of increasing yield of production of virus like particle (VLP) comprising modified structural protein in a host or host cell are also provided. The methods comprise the introduction of a nucleic acid comprising a sequence that encodes a modified structural protein into the host or host cell, and incubating the host or host cell under conditions that permit the expression of the nucleic acid, thereby producing the VLP. The modified viral structural protein may be produced at a higher yield compared to a host or host cell expressing the unmodified viral structural protein.

[0332] For example, as shown in FIG. 3A, yields of VLPs expressed in plants may be increased when the cytoplasmic tail (CT) of a viral structural protein is replaced with the CT of influenza HA to produce a modified viral structural protein, such for example a modified S protein. As further shown in FIGS. 11A and 11B, when the modified S protein further comprises one or more than one substitution wherein the one or more than one substitution comprise or consist of one or more than one substitution of an amino acid corresponding to amino acid at positions 667, 668, 670, 802, 923, 927, 971 and/or 972 of SEQ ID NO: 2, yield of VLPs comprising the modified S protein when expressed in plants, may be further increased.

[0333] The yield of the modified viral structural protein (such as modified S protein) or the yield of a VLP comprising modified viral structural protein produced in a host or host cell, such for example a plant or plant cells, may be increased by 1.1-10 fold, or any amount therebetween when compared to the yield of a corresponding unmodified viral structural protein or the yield of VLP that comprises the corresponding unmodified viral structural protein. For example the yield of the modified viral structural protein (such as modified S protein) or the yield of a VLP (comprising the modified viral structural protein) in a host or host cell may be increased by 1.1, 1.2, 1.3, 1.4, 1.5, 1.6, 1.7, 1.8, 1.9, 2, 2.1, 2.2, 2.3, 2.4, 2.5, 2.6, 2.7, 2.8, 2.9, 3, 3.1, 3.2, 3.3, 3.4, 3.5, 3.6, 3.7, 3.8, 3.9, 4, 4.1, 4.2, 4.3, 4.4, 4.5, 4.6, 4.7, 4.8, 4.9, 5.1, 5.2, 5.3, 5.4, 5.5, 5.6, 5.6, 5.7, 5.8, 5.9, 6, 6.1, 6.2, 6.3, 6.4, 6.5, 6.6, 6.7, 6.8, 6.9, 7, 7.1, 7.2, 7.3, 7.4, 7.5, 7.6, 7.7, 7.8, 7.9, 8, 8.1, 8.2, 8.3, 8.4, 8.5, 8.6, 8.7, 8.8, 8.9, 9 9.1, 9.2, 9.3, 9.4, 9.5, 9.6, 9.7, 9.8, 9.9, 10 fold or any amount therebetween, compared to the yield of a corresponding unmodified viral structural protein or the yield of a VLP wherein the VLP comprises a corresponding unmodified viral structural protein, when produced in a host or host cell under identical conditions.

[0334] The modified viral structural protein described herewith includes modified S proteins with amino acid sequences that have about 70, 75, 80, 85, 87, 90, 91, 92, 93 94, 95, 96, 97, 98, 99, 100% or any amount therebetween, sequence identity, or sequence similarity, with the amino acid sequence of SEQ ID NO: 1, 2, 5, 21, 30, 47, 48, 49, 50, 51, 52, 53, 54, 55, 56, 57, 58, 59, 60, 61, 62, 95, 96, 97, 108, 109, 110, 112, 113, 114, 115, 144, 145, 146, 155, 156, 157, 158, 159, 160, or 161, or with amino acids 25-1259 of SEQ ID NO: 47, amino acids 25-1259 of SEQ ID NO: 48, amino acids 25-1259 of SEQ ID NO: 49, amino acids 25-1259 of SEQ ID NO: 50, amino acids 25-1259 of SEQ ID NO: 51, amino acids 25-1259 of SEQ ID NO: 52, amino acids 25-1259 of SEQ ID NO: 53, amino acids 25-1259 of SEQ ID NO: 54, amino acids 25-1259 of SEQ ID NO: 55, amino acids 25-1259 of SEQ ID NO: 56, amino acids 25-1259 of SEQ ID NO: 57, amino acids 25-1259 of SEQ ID NO: 58, amino acids 25-1262 of SEQ ID NO: 59, amino acids 25-1261 of SEQ ID NO: 60, amino acids 25-1258 of SEQ ID NO: 61, amino acids 25-1256 of SEQ ID NO: 62, amino acids 25-1243 of SEQ ID NO: 95, amino acids 25-1240 of SEQ ID NO: 96, amino acids 25-1243 of SEQ ID NO: 97, amino acids 25-1341 of SEQ ID NO: 108, amino acids 25-1338 of SEQ ID NO: 109, amino acids 25-1341 of SEQ ID NO: 110, amino acids 25-1351 of SEQ ID NO: 144, amino acids 25-1348 of SEQ ID NO: 145, amino acids 25-1351 of SEQ ID NO: 146, amino acids 25-1159 of SEQ ID NO: 155, amino acids 25-1156 of SEQ ID NO: 156, or amino acids 25-1159 of SEQ ID NO: 157, and wherein modified S proteins when expressed in a host or host cell form VLP. The amino acid sequence of the ectodomain and the transmembrane domain of the modified S proteins has about 70, 75, 80, 85, 87, 90, 91, 92, 93 94, 95, 96, 97, 98, 99, 100% or any amount therebetween sequence identity, or sequence similarity, with amino acids 1-1234 of SEQ ID NO:1, with amino acids 1-1219 of SEQ ID NO: 2, with amino acids 1-1234 of SEQ ID NO: 5, with amino acids 1-1219 of SEQ ID NO: 21, with amino acids 1-1243 of SEQ ID NO: 30, with the amino acids 25-1243 of SEQ ID NO: 47, with the amino acids 25-1243 of SEQ ID NO: 48, with the amino acids 25-1243 of SEQ ID NO: 49, with the amino acids 25-1243 of SEQ ID NO: 50, with the amino acids 25-1243 of SEQ ID NO: 51, with the amino acids 25-1243 of SEQ ID NO: 52, with the amino acids 25-1243 of SEQ ID NO: 53, with the amino acids 25-1243 of SEQ ID NO: 54, with the amino acids 25-1243 of SEQ ID NO: 55, with the amino acids 25-1243 of SEQ ID NO: 56, with the amino acids 25-1243 of SEQ ID NO: 57, with the amino acids 25-1243 of SEQ ID NO: 58, with the amino acids 25-1242 of SEQ ID NO: 59, with the amino acids 25-1242 of SEQ ID NO: 60, with the amino acids 25-1246 of SEQ ID NO: 61, or with the amino acids 25-1245 of SEQ ID NO: 62, amino acids 25-1227 of SEQ ID NO: 95, amino acids 25-1227 of SEQ ID NO: 96, amino acids 25-1227 of SEQ ID NO: 97, amino acids 25-1325 of SEQ ID NO: 108, amino acids 25-1325 of SEQ ID NO: 109, amino acids 25-1325 of SEQ ID NO: 110, amino acids 25-1335 of SEQ ID NO: 144, amino acids 25-1335 of SEQ ID NO: 145, amino acids 25-1335 of SEQ ID NO: 146, amino acids 25-1143 of SEQ ID NO: 155, amino acids 25-1143 of SEQ ID NO: 156, or amino acids 25-1143 of SEQ ID NO: 157, and the amino acid sequence of the cytoplasmic tail domain (CT) of the modified S protein has about 70, 75, 80, 85, 87, 90, 91, 92, 93 94, 95, 96, 97, 98, 99, 100% or any amount therebetween sequence identity, or sequence similarity, with the sequence of SEQ ID NO: 15, or with amino acids 35-50 of SEQ ID NO 6, 8, 7, 9, 10, 12, 13, 14, or with amino acids 34-49 of SEQ ID NO 11, or with amino acids 553-568 of SEQ ID NO:3 and wherein modified S proteins when expressed in a host or host cell form VLP.

[0335] Furthermore, the modified viral structural protein may be encoded by a nucleotide sequence that has about 70, 75, 80, 85, 87, 90, 91, 92, 93 94, 95, 96, 97, 98, 99, 100% or any amount therebetween, sequence identity, or sequence similarity, with the nucleotide sequence according to SEQ ID NO: 22, 26, 29, 70, 71, 72, 73, 74, 75, 76, 77, 78, 79, 90, 91, 92, 95, 96, 97, 103, 104, 105, 139, 140, 141, 150, 151, or 152 and wherein the nucleotide sequence encodes modified S proteins that when expressed in a host or host cell form VLP.

[0336] It is further provided nucleotide sequence encoding a modified S proteins with amino acid sequences that have about 70, 75, 80, 85, 87, 90, 91, 92, 93 94, 95, 96, 97, 98, 99, 100% or any amount therebetween, sequence identity, or sequence similarity, with the amino acid sequence of SEQ ID NO: 1, 2, 5, 21, 30, 47, 48, 49, 50, 51, 52, 53, 54, 55, 56, 57, 58, 59, 60, 61, 62, 95, 96, 97, 108, 109, 110, 144, 145, 146, 155, 156 or 157, and wherein modified S proteins when expressed in a host or host cell form VLP. The nucleotide sequence may encode an amino acid sequence of the ectodomain and the transmembrane domain of the modified S proteins that has about 70, 75, 80, 85, 87, 90, 91, 92, 93 94, 95, 96, 97, 98, 99, 100% or any amount therebetween sequence identity, or sequence similarity, with amino acids 1-1234 of SEQ ID NO:1, with amino acids 1-1219 of SEQ ID NO: 2, with amino acids 1-1234 of SEQ ID NO: 5, with amino acids 1-1219 of SEQ ID NO: 21 or with amino acids 1-1243 of SEQ ID NO: 30, with the amino acids 25-1243 of SEQ ID NO: 47, with the amino acids 25-1243 of SEQ ID NO: 48, with the amino acids 25-1243 of SEQ ID NO: 49, with the amino acids 25-1243 of SEQ ID NO: 50, with the amino acids 25-1243 of SEQ ID NO: 51, with the amino acids 25-1243 of SEQ ID NO: 52, with the amino acids 25-1243 of SEQ ID NO: 53, with the amino acids 25-1243 of SEQ ID NO: 54, with the amino acids 25-1243 of SEQ ID NO: 55, with the amino acids 25-1243 of SEQ ID NO: 56, with the amino acids 25-1243 of SEQ ID NO: 57, with the amino acids 25-1243 of SEQ ID NO: 58, with the amino acids 25-1242 of SEQ ID NO: 59, with the amino acids 25-1242 of SEQ ID NO: 60, with the amino acids 25-1246 of SEQ ID NO: 61, with the amino acids 25-1245 of SEQ ID NO: 62, amino acids 25-1227 of SEQ ID NO: 95, amino acids 25-1227 of SEQ ID NO: 96, amino acids 25-1227 of SEQ ID NO: 97, amino acids 25-1325 of SEQ ID NO: 108, amino acids 25-1325 of SEQ ID NO: 109, amino acids 25-1325 of SEQ ID NO: 110, amino acids 25-1335 of SEQ ID NO: 144, amino acids 25-1335 of SEQ ID NO: 145, amino acids 25-1335 of SEQ ID NO: 146, amino acids 25-1143 of SEQ ID NO: 155, amino acids 25-1143 of SEQ ID NO: 156, or amino acids 25-1143 of SEQ ID NO: 157, and the amino acid sequence of the cytoplasmic tail domain of the modified S protein has about 70, 75, 80, 85, 87, 90, 91, 92, 93 94, 95, 96, 97, 98, 99, 100% or any amount therebetween sequence identity, or sequence similarity, with the sequence of SEQ ID NO: 15, or with amino acids 35-50 of SEQ ID NO 6, 8, 7, 9, 10, 12, 13, 14, or with amino acids 34-49 of SEQ ID NO 11, or with amino acids 553-568 of SEQ ID NO:3 and wherein modified S proteins when expressed in a host or host cell form VLP.

[0337] It is further provided a nucleotide sequence encoding a modified S proteins with amino acid sequences that have about 70, 75, 80, 85, 87, 90, 91, 92, 93 94, 95, 96, 97, 98, 99, 100% or any amount therebetween, sequence identity, or sequence similarity, with the amino acid sequence of SEQ ID NO: 5, 21, 30, or 47-62, or with amino acids 24-1259 of SEQ ID NO: 47 amino acids 25-1259 of SEQ ID NO: 48, amino acids 25-1259 of SEQ ID NO: 49, amino acids 25-1259 of SEQ ID NO: 50, amino acids 25-1259 of SEQ ID NO: 51, amino acids 25-1259 of SEQ ID NO: 52, amino acids 25-1259 of SEQ ID NO: 53, amino acids 25-1259 of SEQ ID NO: 54, amino acids 25-1259 of SEQ ID NO: 55, amino acids 25-1259 of SEQ ID NO: 56, amino acids 25-1259 of SEQ ID NO: 57, amino acids 25-1259 of SEQ ID NO: 58, amino acids 25-1262 of SEQ ID NO: 59, amino acids 25-1261 of SEQ ID NO: 60, amino acids 25-1258 of SEQ ID NO: 61, or amino acids 25-1256 of SEQ ID NO: 62, amino acids 25-1243 of SEQ ID NO: 95, amino acids 25-1240 of SEQ ID NO: 96, amino acids 25-1243 of SEQ ID NO: 97, amino acids 25-1341 of SEQ ID NO: 108, amino acids 25-1338 of SEQ ID NO: 109, amino acids 25-1341 of SEQ ID NO: 110, amino acids 25-1351 of SEQ ID NO: 144, amino acids 25-1348 of SEQ ID NO: 145, amino acids 25-1351 of SEQ ID NO: 146, amino acids 25-1159 of SEQ ID NO: 155, amino acids 25-1156 of SEQ ID NO: 156, or amino acids 25-1159 of SEQ ID NO: 157, and wherein modified S proteins when expressed in a host or host cell form VLP.

[0338] The terms “percent similarity”, “sequence similarity”, “percent identity”, or “sequence identity”, when referring to a particular sequence, are used for example as set forth in the University of Wisconsin GCG software program, or by manual alignment and visual inspection (see, e.g., Current Protocols in Molecular Biology, Ausubel et al., eds. 1995 supplement). Methods of alignment of sequences for comparison are well-known in the art. Optimal alignment of sequences for comparison can be conducted, using for example the algorithm of Smith & Waterman, (1981, Adv. Appl. Math. 2:482), by the alignment algorithm of Needleman & Wunsch, (1970, J. Mol. Biol. 48:443), by the search for similarity method of Pearson & Lipman, (1988, Proc. Natl. Acad. Sci. USA 85:2444), by computerized implementations of these algorithms (for example: GAP, BESTFIT, FASTA, and TFASTA in the Wisconsin Genetics Software Package, Genetics Computer Group (GCG), 575 Science Dr., Madison, Wis.).

[0339] An example of an algorithm suitable for determining percent sequence identity and sequence similarity are the BLAST and BLAST 2.0 algorithms, which are described in Altschul et al., (1977, Nuc. Acids Res. 25:3389-3402) and Altschul et al., (1990, J. Mol. Biol. 215:403-410), respectively. BLAST and BLAST 2.0 are used, with the parameters described herein, to determine percent sequence identity for the nucleic acids and proteins of the disclosure. For example the BLASTN program (for nucleotide sequences) may use as defaults a wordlength (W) of 11, an expectation (E) of 10, M=5, N=−4 and a comparison of both strands. For amino acid sequences, the BLASTP program may use as defaults a word length of 3, and expectation (E) of 10, and the BLOSUM62 scoring matrix (see Henikoff & Henikoff, 1989, Proc. Natl. Acad. Sci. USA 89:10915) alignments (B) of 50, expectation (E) of 10, M=5, N=−4, and a comparison of both strands. Software for performing BLAST analyses is publicly available through the National Center for Biotechnology Information (see URL: ncbi.nlm.nih.gov/).

[0340] A nucleic acid sequence or nucleotide sequence referred to in the present disclosure, may be “substantially homologous”, “substantially similar” or “substantially identical” to a sequence, or a compliment of the sequence if the nucleic acid sequence or nucleotide sequence hybridise to one or more than one nucleotide sequence or a compliment of the nucleic acid sequence or nucleotide sequence as defined herein under stringent hybridisation conditions. Sequences are “substantially homologous” “substantially similar” “substantially identical” when at least about 70%, or between 70 to 100%, or any amount therebetween, for example 70, 72, 74, 76, 78, 80, 82, 84, 86, 88, 90, 92, 94, 96, 98, 100%, or any amount therebetween, of the nucleotides match over a defined length of the nucleotide sequence providing that such homologous sequences exhibit one or more than one of the properties of the sequence, or the encoded product as described herein.

[0341] Many organisms display a bias for use of particular codons to code for insertion of a particular amino acid in a growing peptide chain. Codon preference or codon bias, differences in codon usage between organisms, is afforded by degeneracy of the genetic code, and is well documented among many organisms. Codon bias often correlates with the efficiency of translation of messenger RNA (mRNA), which is in turn believed to be dependent on, inter alia, the properties of the codons being translated and the availability of particular transfer RNA (tRNA) molecules. The predominance of selected tRNAs in a cell is generally a reflection of the codons used most frequently in peptide synthesis. Accordingly, genes can be tailored for optimal gene expression in a given organism based on codon optimization. The process of optimizing the nucleotide sequence coding for a heterologously expressed protein may be an important step for improving expression yields. The optimization requirements may include steps to improve the ability of the host to produce the foreign protein.

[0342] There are different codon-optimization techniques known in the art for improving, the translational kinetics of translationally inefficient protein coding regions. These techniques mainly rely on identifying the codon usage for a certain host organism. If a certain gene or sequence should be expressed in this organism, the coding sequence of such genes and sequences will then be modified such that one will replace codons of the sequence of interest by more frequently used codons of the host organism.

[0343] “Codon optimization” is defined as modifying a nucleic acid sequence for enhanced expression in a host or host cell of interest by replacing at least one, more than one, or a significant number, of codons of the native sequence with codons that may be more frequently or most frequently used in the genes of another organism or species. Various species exhibit particular bias for certain codons of a particular amino acid.

[0344] The present disclosure includes synthetic polynucleotide sequences that have been codon optimized for example the sequences have been optimized for human codon usage or plant codon usage. The codon optimized polynucleotide sequences may then be expressed in the host for example plants. More specifically the sequences optimized for human codon usage or plant codon usage may be expressed in plants. Without wishing to be bound by theory, it is believed that the sequences optimized for human codon increases the guanine-cytosine content (GC content) of the sequence and improves expression yields when plants are used as host.

[0345] The term “construct”, “vector” or “expression vector”, as used herein, refers to a recombinant nucleic acid for transferring exogenous nucleotide sequences (for example a nucleotide sequences encoding the modified viral structural protein as described herewith) into host cells (e.g. plant cells) and directing expression of the exogenous nucleic acid sequences in the host cells. “Expression cassette” refers to a nucleic acid comprising a nucleotide sequence of interest under the control of, and operably (or operatively) linked to, an appropriate promoter or other regulatory elements for transcription of the nucleic acid of interest in a host cell. As one of skill in the art would appreciate, the expression cassette may comprise a termination (terminator) sequence that is any sequence that is active the host cell (e.g. plant host). For example in plants, the termination sequence may be derived from the RNA-2 genome segment of a bipartite RNA virus, e.g. a comovirus, the termination sequence may be a NOS terminator, or terminator sequence may be obtained from the 3′UTR of the alfalfa plastocyanin gene.

[0346] The nucleic acid comprising a nucleotide sequence encoding a modified viral structural protein, as described herein may further comprise sequences that enhance expression of the viral structural protein in the host, portion of the host or host cell. Sequences that enhance expression may include, a 5′ UTR enhancer element, or a plant-derived expression enhancer, in operative association with the nucleic acid encoding the modified viral structural protein. The sequence encoding the modified viral structural protein may also be optimized to increase expression by for example optimizing for human codon usage, increased GC content, or a combination thereof.

[0347] By “regulatory region” “regulatory element” or “promoter” it is meant a portion of nucleic acid typically, but not always, upstream of the protein coding region of a gene, which may be comprised of either DNA or RNA, or both DNA and RNA. When a regulatory region is active, and in operative association, or operatively linked, with a nucleotide sequence of interest, this may result in expression of the nucleotide sequence of interest. A regulatory element may be capable of mediating organ specificity, or controlling developmental or temporal gene activation. A “regulatory region” includes promoter elements, core promoter elements exhibiting a basal promoter activity, elements that are inducible in response to an external stimulus, elements that mediate promoter activity such as negative regulatory elements or transcriptional enhancers. “Regulatory region”, as used herein, also includes elements that are active following transcription, for example, regulatory elements that modulate gene expression such as translational and transcriptional enhancers, translational and transcriptional repressors, upstream activating sequences, and mRNA instability determinants. Several of these latter elements may be located proximal to the coding region.

[0348] In the context of this disclosure, the term “regulatory element” or “regulatory region” typically refers to a sequence of DNA, usually, but not always, upstream (5′) to the coding sequence of a structural gene, which controls the expression of the coding region by providing the recognition for RNA polymerase and/or other factors required for transcription to start at a particular site. However, it is to be understood that other nucleotide sequences, located within introns, or 3′ of the sequence may also contribute to the regulation of expression of a coding region of interest. An example of a regulatory element that provides for the recognition for RNA polymerase or other transcriptional factors to ensure initiation at a particular site is a promoter element. Most, but not all, eukaryotic promoter elements contain a TATA box, a conserved nucleic acid sequence comprised of adenosine and thymidine nucleotide base pairs usually situated approximately 25 base pairs upstream of a transcriptional start site. A promoter element may comprise a basal promoter element, responsible for the initiation of transcription, as well as other regulatory elements that modify gene expression.

[0349] There are several types of regulatory regions, including those that are developmentally regulated, inducible or constitutive. A regulatory region that is developmentally regulated, or controls the differential expression of a gene under its control, is activated within certain organs or tissues of an organ at specific times during the development of that organ or tissue. However, some regulatory regions that are developmentally regulated may preferentially be active within certain organs or tissues at specific developmental stages, they may also be active in a developmentally regulated manner, or at a basal level in other organs or tissues within the plant as well. Examples of tissue-specific regulatory regions, for example see-specific a regulatory region, include the napin promoter, and the cruciferin promoter (Rask et al., 1998, J. Plant Physiol. 152: 595-599; Bilodeau et al., 1994, Plant Cell 14: 125-130). An example of a leaf-specific promoter includes the plastocyanin promoter (see U.S. Pat. No. 7,125,978, which is incorporated herein by reference).

[0350] An inducible regulatory region is one that is capable of directly or indirectly activating transcription of one or more DNA sequences or genes in response to an inducer. In the absence of an inducer the DNA sequences or genes will not be transcribed. Typically the protein factor that binds specifically to an inducible regulatory region to activate transcription may be present in an inactive form, which is then directly or indirectly converted to the active form by the inducer. However, the protein factor may also be absent. The inducer can be a chemical agent such as a protein, metabolite, growth regulator, herbicide or phenolic compound or a physiological stress imposed directly by heat, cold, salt, or toxic elements or indirectly through the action of a pathogen or disease agent such as a virus. A plant cell containing an inducible regulatory region may be exposed to an inducer by externally applying the inducer to the cell or plant such as by spraying, watering, heating or similar methods. Inducible regulatory elements may be derived from either plant or non-plant genes (e.g. Gatz, C. and Lenk, I. R. P., 1998, Trends Plant Sci. 3, 352-358). Examples, of potential inducible promoters include, but not limited to, tetracycline-inducible promoter (Gatz, C., 1997, Ann. Rev. Plant Physiol. Plant Mol. Biol. 48, 89-108), steroid inducible promoter (Aoyama, T. and Chua, N. H., 1997, Plant J. 2, 397-404) and ethanol-inducible promoter (Salter, M. G., et al, 1998, Plant Journal 16, 127-132; Caddick, M. X., et al, 1998, Nature Biotech. 16, 177-180) cytokinin inducible IB6 and CKI1 genes (Brandstatter, I. and Kieber, J. J., 1998, Plant Cell 10, 1009-1019; Kakimoto, T., 1996, Science 274, 982-985) and the auxin inducible element, DR5 (Ulmasov, T., et al., 1997, Plant Cell 9, 1963-1971).

[0351] A constitutive regulatory region directs the expression of a gene throughout the various parts of a plant and continuously throughout plant development. Examples of known constitutive regulatory elements include promoters associated with the CaMV 35S transcript. (p 35S; Odell et al., 1985, Nature, 313: 810-812; which is incorporated herein by reference), the rice actin 1 (Zhang et al, 1991, Plant Cell, 3: 1155-1165), actin 2 (An et al., 1996, Plant J., 10: 107-121), or tms 2 (U.S. Pat. No. 5,428,147), and triosephosphate isomerase 1 (Xu et. al., 1994, Plant Physiol. 106: 459-467) genes, the maize ubiquitin 1 gene (Cornejo et al, 1993, Plant Mol. Biol. 29: 637-646), the Arabidopsis ubiquitin 1 and 6 genes (Holtorf et al, 1995, Plant Mol. Biol. 29: 637-646), the tobacco translational initiation factor 4A gene (Mandel et al, 1995 Plant Mol. Biol. 29: 995-1004), the Cassava Vein Mosaic Virus promoter, pCAS, (Verdaguer et al., 1996); the promoter of the small subunit of ribulose biphosphate carboxylase, pRbcS: (Outchkourov et al., 2003), the pUbi (for monocots and dicots).

[0352] The term “constitutive” as used herein does not necessarily indicate that a nucleotide sequence under control of the constitutive regulatory region is expressed at the same level in all cell types, but that the sequence is expressed in a wide range of cell types even though variation in abundance is often observed.

[0353] One or more of the genetic constructs of the present disclosure may also include further enhancers, either translation or transcription enhancers, as may be required. Enhancers may be located 5′ or 3′ to the sequence being transcribed. Enhancer regions are well known to persons skilled in the art, and may include an ATG initiation codon, adjacent sequences or the like. The initiation codon, if present, may be in phase with the reading frame (“in frame”) of the coding sequence to provide for correct translation of the transcribed sequence.

[0354] The term “5′UTR” or “5′ untranslated region”, “5′ leader sequence” or “5′ UTR enhancer element” refers to regions of an mRNA that are not translated. The 5′UTR typically begins at the transcription start site and ends just before the translation initiation site or start codon of the coding region. The 5′ UTR may modulate the stability and/or translation of an mRNA transcript.

[0355] The term “plant-derived expression enhancer”, as used herein, refers to a nucleotide sequence obtained from a plant, the nucleotide sequence encoding a 5′UTR. Examples of a plant derived expression enhancer are described in U.S. Provisional Patent Application No. 62/643,053 (Filed Mar. 14, 2018) and International Application No. PCT/CA2019/050319 (Filed Mar. 14, 2019); which are incorporated herein by reference) or in Diamos A. G. et al. (2016, Front Plt Sci. 7:1-15; which is incorporated herein by reference). The plant-derived expression enhancer may be selected from nbEPI42, nbSNS46, nbCSY65, nbHEL40, nbSEP44, nbMT78, nbATL75, nbDJ46, nbCHP79, nbEN42, atHSP69, atGRP62, atPK65, atRP46, nb30S72, nbGT61, nbPV55, nbPPI43, nbPM64 and nbH2A86 as described in U.S. 62/643,053 and PCT/CA2019/050319. The plant derived expression enhancer may be used within a plant expression system comprising a regulatory region that is operatively linked with the plant-derived expression enhancer sequence and a nucleotide sequence of interest, for example a nucleotide sequence encoding a modified S protein.

[0356] Stability and/or translation efficiency of an RNA may further be improved by the inclusion of a 3′ untranslated region (3′UTR). The one or more genetic constructs of the present description may therefore further comprise a 3′ UTR.

[0357] A 3′ untranslated region may contain a polyadenylation signal and any other regulatory signals capable of effecting mRNA processing or gene expression. The polyadenylation signal is usually characterized by effecting the addition of polyadenylic acid tracks to the 3′ end of the mRNA precursor. Polyadenylation signals are commonly recognized by the presence of homology to the canonical form 5′ AATAAA-3′ although variations are not uncommon. Non-limiting examples of suitable 3′ regions are the 3′ transcribed non-translated regions containing a polyadenylation signal of Agrobacterium tumor inducing (Ti) plasmid genes, such as the nopaline synthase (Nos gene) and plant genes such as the soybean storage protein genes, the small subunit of the ribulose-1, 5-bisphosphate carboxylase gene (ssRUBISCO; U.S. Pat. No. 4,962,028; which is incorporated herein by reference), the promoter used in regulating plastocyanin expression, described in U.S. Pat. No. 7,125,978 (which is incorporated herein by reference), 3′ UTR derived from a Arracacha virus B isolate gene (AvB) (SEQ ID NO: 40), 3′UTR derived from Beet necrotic yellow vein virus (trBNYVV) (SEQ ID NO: 41), 3′UTR derived from Southern bean mosaic virus (SBMV) (SEQ ID NO: 42), 3′UTR derived from Turnip ringspot virus (TuRSV) (SEQ ID NO: 43), 3′ UTR derived from Cowpea Mosaic Virus (CPMV) (SEQ ID NO: 44), 3′UTR derived from Broad bean true mosaic virus (BBTMV) (SEQ ID NO: 45) or 3′UTR derived from Ourmia melon virus (trOUMV) (SEQ ID NO: 46). The 3′UTR might be used in conjunction with 5′UTR derived from heterologous sequences to modulate expression levels.

[0358] It is therefore provided a “construct”, “vector”, “expression vector” or “expression cassette” that comprises a nucleic acid comprising a nucleotide sequence of interest (such as a modified viral structural protein) under the control of, and operably (or operatively) linked to a 3′UTR. Furthermore, the nucleic acid may comprise a 3′UTR operably (or operatively) linked to a nucleotide sequence of interest (such as a modified viral structural protein).

[0359] The modified viral structural protein may be targeted to any intracellular or extracellular space, organelle or tissue of a host of host cell such as plant or plant cell as desired. In order to localize the expressed protein to a particular location, the nucleic acid encoding the protein may be linked to a nucleic acid sequence encoding a signal peptide or leader sequence. A signal peptide may alternately be referred to as a transit peptide, signal sequence, leader sequence, targeting signal, localization signal, localization sequence, transit peptide, or leader peptide.

[0360] The one or more than one modified genetic constructs of the present description may be expressed in any suitable host or host cell that is transformed by the nucleic acids, or nucleotide sequence, or constructs, or vectors of the present disclosure. The host or host cell may be from any source including plants, fungi, bacteria, insect and animals for example mammals. Therefore the host or host cell may be selected from a plant or plant cell, a fungi or a fungi cell, a bacteria or bacteria cell, an insect or an insect cell, and animal or an animal cell. The mammal or animal may not be a human. In a preferred embodiment the host or host cell is a plant, portion of a plant or plant cell.

[0361] The term “plant”, “portion of a plant”, “plant portion”, “plant matter”, “plant biomass”, “plant material”, plant extract”, or “plant leaves”, as used herein, may comprise an entire plant, tissue, cells, or any fraction thereof, intracellular plant components, extracellular plant components, liquid or solid extracts of plants, or a combination thereof, that are capable of providing the transcriptional, translational, and post-translational machinery for expression of one or more than one nucleic acids described herein, and/or from which an expressed protein or VLP may be extracted and purified. Plants may include, but are not limited to, herbaceous plants. The herbaceous plants may be annuals, biennials or perennials plants. Plants may further include, but are not limited to agricultural crops including for example canola, Brassica spp., maize, Nicotiana spp., (tobacco) for example, Nicotiana benthamiana, Nicotiana rustica, Nicotiana, tabacum, Nicotiana alata, Arabidopsis thaliana, alfalfa, potato, sweet potato (Ipomoea batatus), ginseng, pea, oat, rice, soybean, wheat, barley, sunflower, cotton, corn, rye (Secale cereale), Sorghum (Sorghum bicolor, Sorghum vulgare), safflower (Carthamus tinctorius).

[0362] The term “plant portion”, as used herein, refers to any part of the plant including but not limited to leaves, stem, root, flowers, fruits, a plant cell obtained from leaves, stem, root, flowers, fruits, a plant extract obtained from leaves, stem, root, flowers, fruits, or a combination thereof. In one embodiment the plant portion refers to the areal portion of a plant such as for example leaves, stem, flowers and fruits. The term “plant extract”, as used herein, refers to a plant-derived product that is obtained following treating a plant, a portion of a plant, a plant cell, or a combination thereof, physically (for example by freezing followed by extraction in a suitable buffer), mechanically (for example by grinding or homogenizing the plant or portion of the plant followed by extraction in a suitable buffer), enzymatically (for example using cell wall degrading enzymes), chemically (for example using one or more chelators or buffers), or a combination thereof. A plant extract may be further processed to remove undesired plant components for example cell wall debris. A plant extract may be obtained to assist in the recovery of one or more components from the plant, portion of the plant or plant cell, for example a protein (including protein complexes, protein surprastructures and/or VLPs), a nucleic acid, a lipid, a carbohydrate, or a combination thereof from the plant, portion of the plant, or plant cell. If the plant extract comprises proteins, then it may be referred to as a protein extract. A protein extract may be a crude plant extract, a partially purified plant or protein extract, or a purified product, that comprises one or more proteins, protein complexes such for example protein trimers, protein suprastructures, and/or VLPs, from the plant tissue. If desired a protein extract, or a plant extract, may be partially purified using techniques known to one of skill in the art, for example, the extract may be subjected to salt or pH precipitation, centrifugation, gradient density centrifugation, filtration, chromatography, for example, size exclusion chromatography, ion exchange chromatography, affinity chromatography, or a combination thereof. A protein extract may also be purified, using techniques that are known to one of skill in the art.

[0363] The constructs of the present disclosure can be introduced into plant cells using Ti plasmids, Ri plasmids, plant virus vectors, direct DNA transformation, micro-injection, electroporation, etc. For reviews of such techniques see for example Weissbach and Weissbach, Methods for Plant Molecular Biology, Academy Press, New York VIII, pp. 421-463 (1988); Geierson and Corey, Plant Molecular Biology, 2d Ed. (1988); and Miki and Iyer, Fundamentals of Gene Transfer in Plants. In Plant Metabolism, 2d Ed. DT. Dennis, DH Turpin, DD Lefebvre, DB Layzell (eds), Addison Wesly, Langmans Ltd. London, pp. 561-579 (1997). Other methods include direct DNA uptake, the use of liposomes, electroporation, for example using protoplasts, micro-injection, microprojectiles or whiskers, and vacuum infiltration. See, for example, Bilang, et al. (Gene 100: 247-250 (1991), Scheid et al. (Mol. Gen. Genet. 228: 104-112, 1991), Guerche et al. (Plant Science 52: 111-116, 1987), Neuhause et al. (Theor. Appl Genet. 75: 30-36, 1987), Klein et al., Nature 327: 70-73 (1987); Howell et al. (Science 208: 1265, 1980), Horsch et al. (Science 227: 1229-1231, 1985), DeBlock et al., Plant Physiology 91: 694-701, 1989), Methods for Plant Molecular Biology (Weissbach and Weissbach, eds., Academic Press Inc., 1988), Methods in Plant Molecular Biology (Schuler and Zielinski, eds., Academic Press Inc., 1989), Liu and Lomonossoff (J Virol Meth, 105:343-348, 2002), U.S. Pat. Nos. 4,945,050; 5,036,006; and 5,100,792, U.S. patent application Ser. No. 08/438,666, filed May 10, 1995, and Ser. No. 07/951,715, filed Sep. 25, 1992, (all of which are hereby incorporated by reference).

[0364] As described below, transient expression methods may be used to express the constructs of the present disclosure (see Liu and Lomonossoff, 2002, Journal of Virological Methods, 105:343-348; which is incorporated herein by reference). Alternatively, a vacuum-based transient expression method, as described by Kapila et al., 1997, which is incorporated herein by reference) may be used. These methods may include, for example, but are not limited to, a method of Agro-inoculation or Agroinfiltration, syringe infiltration, however, other transient methods may also be used as noted above. With Agro-inoculation, Agroinfiltration, or syringe infiltration, a mixture of Agrobacteria comprising the desired nucleic acid enter the intercellular spaces of a tissue, for example the leaves, aerial portion of the plant (including stem, leaves and flower), other portion of the plant (stem, root, flower), or the whole plant. After crossing the epidermis the Agrobacteria infect and transfer t-DNA copies into the cells. The t-DNA is episomally transcribed and the mRNA translated, leading to the production of the protein of interest in infected cells, however, the passage of t-DNA inside the nucleus is transient.

[0365] To aid in identification of transformed plant cells, the constructs of this disclosure may be further manipulated to include plant selectable markers. Useful selectable markers include enzymes that provide for resistance to chemicals such as an antibiotic for example, gentamycin, hygromycin, kanamycin, or herbicides such as phosphinothrycin, glyphosate, chlorosulfuron, and the like. Similarly, enzymes providing for production of a compound identifiable by colour change such as GUS (beta-glucuronidase), or luminescence, such as luciferase or GFP, may be used.

[0366] Also considered part of this disclosure are transgenic plants, plant cells or seeds containing the gene construct of the present disclosure that may be used as a platform plant suitable for transient protein expression described herein. Methods of regenerating whole plants from plant cells are also known in the art (for example see Guerineau and Mullineaux (1993, Plant transformation and expression vectors. In: Plant Molecular Biology Labfax (Croy RRD ed) Oxford, BIOS Scientific Publishers, pp 121-148). In general, transformed plant cells are cultured in an appropriate medium, which may contain selective agents such as antibiotics, where selectable markers are used to facilitate identification of transformed plant cells. Once callus forms, shoot formation can be encouraged by employing the appropriate plant hormones in accordance with known methods and the shoots transferred to rooting medium for regeneration of plants. The plants may then be used to establish repetitive generations, either from seeds or using vegetative propagation techniques. Transgenic plants can also be generated without using tissue culture. Methods for stable transformation, and regeneration of these organisms are established in the art and known to one of skill in the art. Available techniques are reviewed in Vasil et al. (Cell Culture and Somatic Cell Genetics of Plants, Vol I, Il and III, Laboratory Procedures and Their Applications, Academic Press, 1984), and Weissbach and Weissbach (Methods for Plant Molecular Biology, Academic Press, 1989). The method of obtaining transformed and regenerated plants is not critical to the present disclosure.

[0367] If plants, plant portions or plant cells are to be transformed or co-transformed by two or more nucleic acid constructs, the nucleic acid construct may be introduced into the Agrobacterium in a single transfection event so that the nucleic acids are pooled, and the bacterial cells transfected. Alternatively, the constructs may be introduced serially. In this case, a first construct is introduced into the Agrobacterium as described, the cells are grown under selective conditions (e.g. in the presence of an antibiotic) where only the singly transformed bacteria can grow. Following this first selection step, a second nucleic acid construct is introduced into the Agrobacterium as described, and the cells are grown under double-selective conditions, where only the double-transformed bacteria can grow. The double-transformed bacteria may then be used to transform a plant, portion of the plant or plant cell as described herein, or may be subjected to a further transformation step to accommodate a third nucleic acid construct.

[0368] Alternatively, if plants, plant portions, or plant cells are to be transformed or co-transformed by two or more nucleic acid constructs, the nucleic acid construct may be introduced into the plant by co-infiltrating a mixture of Agrobacterium cells with the plant, plant portion, or plant cell, each Agrobacterium cell may comprise one or more constructs to be introduced within the plant. In order to vary the relative expression levels within the plant, plant portion or plant cell, of a nucleotide sequence of interest within a construct, during the step of infiltration, the concentration of the various Agrobacteria populations comprising the desired constructs may be varied.

[0369] The modified viral surface protein or VLP comprising modified viral surface protein as described herewith, may be used to elicit an immune response in a subject.

[0370] An “immune response” generally refers to a response of the adaptive immune system of a subject. The adaptive immune system generally comprises a humoral response, and a cell-mediated response. The humoral response is the aspect of immunity that is mediated by secreted antibodies, produced in the cells of the B lymphocyte lineage (B cell). Secreted antibodies bind to antigens on the surfaces of invading microbes (such as viruses or bacteria), which flags them for destruction. Humoral immunity is used generally to refer to antibody production and the processes that accompany it, as well as the effector functions of antibodies, including Th2 cell activation and cytokine production, memory cell generation, opsonin promotion of phagocytosis, pathogen elimination and the like. The terms “modulate” or “modulation” or the like refer to an increase or decrease in a particular response or parameter, as determined by any of several assays generally known or used, some of which are exemplified herein.

[0371] A cell-mediated response is an immune response that does not involve antibodies but rather involves the activation of macrophages, natural killer cells (NK), antigen-specific cytotoxic T-lymphocytes, and the release of various cytokines in response to an antigen. Cell-mediated immunity is used generally to refer to some Th cell activation, Tc cell activation and T-cell mediated responses. Cell mediated immunity may be of particular importance in responding to viral infections.

[0372] For example, the induction of antigen specific CD8 positive T lymphocytes may be measured using an ELISPOT assay; stimulation of CD4 positive T-lymphocytes may be measured using a proliferation assay. Anti-Coronavirus antibody titers may be quantified using an ELISA assay; isotypes of antigen-specific or cross-reactive antibodies may also be measured using anti-isotype antibodies (e.g. anti-IgG, IgA, IgE or IgM). Methods and techniques for performing such assays are well-known in the art.

[0373] Cytokine presence or levels may also be quantified. For example a T-helper cell response (Th1/Th2) will be characterized by the measurement of IFN-γ and TL-4 secreting cells using by ELISA (e.g. BD Biosciences OptEIA kits). Peripheral blood mononuclear cells (PBMC) or splenocytes obtained from a subject may be cultured, and the supernatant analyzed. T lymphocytes may also be quantified by fluorescence-activated cell sorting (FACS), using marker specific fluorescent labels and methods as are known in the art.

[0374] A microneutralization assay may also be conducted to characterize an immune response in a subject, see for example the methods of Rowe et al., 1973. Virus neutralization titers may be quantified in a number of ways, including: enumeration of lysis plaques (plaque assay) following crystal violent fixation/coloration of cells; microscopic observation of cell lysis in in vitro culture; and 2) ELISA and spectrophotometric detection of Coronavirus.

[0375] The term “epitope” or “epitopes”, as used herein, refers to a structural part of an antigen to which an antibody specifically binds.

[0376] A method of producing an antibody or antibody fragment is provided, the method comprises administering the modified viral structural protein, a trimer or trimeric modified viral structural protein or VLP comprising the modified viral structural protein as described herewith to a subject, or a host animal, thereby producing the antibody or the antibody fragment. Antibodies or the antibody fragments produced by the method are also provided.

[0377] The present disclosure therefore also provides the use of a viral structural protein or VLP comprising the modified viral structural protein, as described herein, for inducing immunity to a Coronavirus infection in a subject. Also disclosed herein is an antibody or antibody fragment, prepared by administering the modified viral structural protein or VLP comprising the modified viral structural protein, to a subject or a host animal.

[0378] Further provided is a composition comprising an effective dose of modified viral structural protein or VLP comprising the modified viral structural protein, as described herein, and a pharmaceutically acceptable carrier, adjuvant, vehicle, or excipient, for inducing an immune response in a subject. Also provided is a vaccine for inducing an immune response again Coronavirus in a subject, wherein the vaccine comprises an effective dose of the modified viral structural protein or VLP comprising the modified viral structural protein.

[0379] Further provided is a composition that may comprise a mixture of VLPs provided that at least one of the VLPs within the composition comprises modified coronavirus S protein as described herein. For example, each coronavirus S protein including one or more than one modified S protein, from each of one or more than one Coronavirus family, sub-group, type, subtype, lineage or strain may be expressed and the corresponding VLPs purified. Virus like particles obtained from two or more than two Coronavirus families, sub-groups, types, subtypes, lineages or strains (for example, two, three, four, five, six, seven, eight, nine, 10 or more Coronavirus families, sub-groups, types, subtypes, lineages or strains) may be combined as desired to produce a mixture of VLPs, provided that one or more than one VLP in the mixture of VLPs comprises a modified S protein as described herein. The VLPs may be combined or produced in a desired ratio, for example about equivalent ratios, or may be combined in such a manner that one Coronavirus family, sub-group, type, subtype, lineage or strain comprises the majority of the VLPs in the composition. It is further provided a composition of VLPs comprising one or more than one modified S protein with ectodomain and/or TM or portion of a TM derived from each of one or more than one Coronavirus family, sub-group, type, subtype, lineage or strain, such that a mixture of different modified S protein as provided for in this disclosure may be present in any individual VLP of the composition.

[0380] The composition or vaccine may comprise VLP comprising the modified viral structural protein, such as the modified S protein from one type of Coronavirus family, sub-group, type, subtype, lineage or strain, or the composition or vaccine may comprise multiple VLP types, wherein each VLP type comprises modified S protein, wherein the modified S proteins in the same VLP are derived from one type of Coronavirus family, sub-group, type, subtype, lineage or strain i.e. the composition or vaccine may comprise a mixture of different Coronavirus VLP, wherein each VLP may comprise a modified S protein from the same Coronavirus family, sub-group, type, subtype, lineage or strain. For example the composition or vaccine may comprise a first VLP comprising a first modified S protein from a first Coronavirus family, sub-group, type, subtype, lineage or strain and a second VLP comprising a second modified S protein from a second Coronavirus family, sub-group, type, subtype, lineage or strain. Furthermore the composition may also comprise a third VLP comprising a third modified S protein from a third Coronavirus family, sub-group, type, subtype, lineage or strain and/or the composition or vaccine may comprise a fourth VLP comprising a fourth modified S protein from a fourth Coronavirus family, sub-group, type, subtype, lineage or strain. Accordingly, the description also provides compositions or vaccines that are monovalent (univalent), or multivalent (polyvalent). The monovalent composition or vaccine may immunize a subject against a single type of Coronavirus strain, whereas the multivalent composition or vaccine may immunize a subject against more than one Coronavirus strain. For example, the composition or vaccine may be a bivalent composition or vaccine, which upon administration, may immunize a subject against two different types of Coronavirus families, sub-groups, types, subtypes, lineages or strains. Furthermore, the composition or vaccine may be a trivalent composition, or the vaccine or composition may be a tetravalent or quadrivalent composition or vaccine.

[0381] Furthermore, the multivalent composition may comprise VLP comprising one or more than one modified S proteins with different HA cytoplasmic tails. For example, the multivalent composition may comprise a VLP or plurality of VLPs comprising two or more modified S proteins, each comprising a S protein ectodomain, a S protein transmembrane domain, and a cytoplasmic tail derived from HA from an influenza H1, H3, H5, H6, H7, H9 or B strain. Non-limiting examples of influenza strains are for example H1 California/7/2009, H3 A/Minnesota/41/2019, H5 A/Indonesia/5/05, H6 A/Teal/Hong Kong/W312/97, H7 A/Guangdong/17SF003/2016, H9 A/Hong Kong/1073/99 or B/Washington/02/2019.

[0382] The multivalent composition or vaccine with multiple type VLPs may further comprise a pharmaceutically acceptable carrier, adjuvant, vehicle, or excipient, for inducing an immune response in a subject.

[0383] Adjuvant systems to enhance a subject's immune response to a vaccine antigen are well known and may be used in conjunction with the vaccine or pharmaceutical composition as described herewith. There are many types of adjuvants that may be used. Common adjuvants for human use are aluminum hydroxide, aluminum phosphate and calcium phosphate. There are also a number of adjuvants based on oil emulsions (oil in water or water in oil emulsions such as Freund's incomplete adjuvant (FIA), Montanide™, Adjuvant 65, and Lipovant™), products from bacterial (or their synthetic derivatives), endotoxins, fatty acids, paraffinic, or vegetable oils, cholesterols, and aliphatic amines or natural organic compounds such for example squalene. Non-limiting adjuvants that might be used include for example oil-in water emulsions of squalene oil (for example MF-59 or AS03), adjuvant composed of the synthetic TLR4 agonist glucopyranosyl lipid A (GLA) integrated into stable emulsion (SE) (GLA-SE) or CpG 1018 a toll-like receptor (TLR9) agonist adjuvant.

[0384] Therefore the vaccine or pharmaceutical composition may comprise one or more than one adjuvant. For example the vaccine or pharmaceutical composition may comprise aluminum hydroxide, aluminum phosphate, calcium phosphate, an oil in water or water in oil emulsions, an emulsion comprising squalene (for example MF-59 or AS03), an emulsion comprising GLA-SE, or CpG 1018 adjuvant.

[0385] The pharmaceutical compositions, vaccines or formulations of the present description may be manufactured in a manner that is itself known, e.g., by means of conventional mixing, dissolving, granulating, dragee-making, levigating, emulsifying, encapsulating, entrapping or tableting processes.

[0386] The pharmaceutical compositions, vaccines or formulations may be produced by mixing or premixing of any constituent components before administration, for example by manual or mechanically-aided mixing of two or more vaccine suspensions, pharmaceutically acceptable carriers, adjuvants, vehicles, or excipients as a step performed before the final formulation, vaccine, or pharmaceutical composition is administered.

[0387] The pharmaceutical compositions, vaccines or formulations may be administered to a subject orally, intradermally, intranasally, intramuscularly, intraperitoneally, intravenously, or subcutaneously.

[0388] Injectables can be prepared in conventional forms, either as liquid solutions or suspensions, solid forms suitable for solution or suspension in liquid prior to injection, or as emulsions. Suitable excipients are, for example, water, saline, dextrose, mannitol, lactose, lecithin, albumin, sodium glutamate, cysteine hydrochloride, and the like. In addition, if desired, the injectable pharmaceutical compositions may contain minor amounts of nontoxic auxiliary substances, such as wetting agents, pH buffering agents, and the like. Physiologically compatible buffers include, but are not limited to, Hanks's solution, Ringer's solution, or physiological saline buffer. If desired, absorption enhancing preparations (for example, liposomes), may be utilized.

[0389] The composition or vaccine may be administered to a subject once (single dose). Furthermore, the vaccine or composition may be administered to a subject multiple times (multi-dose). Therefore the composition, formulation, or vaccine may be administered to a subject in a single dose to illicit an immune response or the composition, formulation, or vaccine may be administered multiple time (multi dosages). For example a dose of the composition or vaccine may be administered 2, 3, 4 or 5 times. Accordingly, the composition or vaccine may be administered to a subject in an initial dose and one or more than one doses may subsequently be administered to the subject. Administration of the doses may be separated in time from each other. For example after the administration of an initial dose, one or more than one subsequent dose may be administered 1 day, 2 days, 3 days, 4 days, 5 days, 6 days, 1 week, 2 weeks, 3 weeks, 1 month, 2 months, 3 months, 4 months, 5 months or 6 months or any time in between from the administration of the initial dose. Furthermore, the composition or vaccine may be administered annually. For example the composition or vaccine may be administered as a seasonal vaccine.

[0390] The disclosure further provides the following sequences.

TABLE 4
SEQ ID NOs and Description of Sequences

| SEQ | |
|---|---|
| ID NO: | Description of Sequence |
| 1 | Native SARS-CoV-2 S protein wtTM/CT AA (P0DTC2) |
| 2 | Native SARS-CoV-2 S protein wtTM/CT AA (P0DTC2) without signal peptide (SP) |
| 3 | H5 A/Indonesia/5/05 Hemagglutinin (HA) AA (A5A5L7) |
| 4 | H5 A/Indonesia/5/05 Hemagglutinin (HA) viral cDNA (EF541394.1) |
| 5 | Modified SARS-CoV-2 with H5 A/Indonesia/5/05 (H5i) Hemagglutinin CT AA |
| 6 | H1 California/7/2009Hemagglutinin TM/CT region AA |
| 7 | H2 A/Singapore/1/1957 HA Hemagglutinin TM/CT region AA |
| 8 | H3 A/Minnesota/41/2019 Hemagglutinin TM/CT region AA |
| 9 | H5 A/Indonesia/5/05 Hemagglutinin TM/CT region AA |
| 10 | H6 A/Teal/Hong Kong/W312/97 Hemagglutinin TM/CT region AA |
| 11 | H7 A/Guangdong/17SF003/2016 Hemagglutinin TM/CT region AA |
| 12 | H9 A/Hong Kong/1073/99 Hemagglutinin TM/CT region AA |
| 13 | B/Washington/02/2019 Hemagglutinin TM/CT region AA |
| 14 | Consensus Sequence of C-Terminal Region of Influenza Hemagglutinin TM/CT region |
| 15 | Consensus Sequence of CT Domain of Influenza Hemagglutinin |
| 16 | TM/CT Region of Native SARS-CoV-2 S protein (wtTM/CT) |
| 17 | TM/CT of H5 A/Indonesia/5/05 Hemagglutinin (H5iTM/CT) |
| 18 | TM/CT Region of Modified SARS-CoV-2 S protein with H5i Hemagglutinin CT |
| 19 | TM/CT Region of Modified S protein with H5i Hemagglutinin CT (Variation 1) |
| 20 | (no SP) SARS-CoV-2 S protein GSAS + PP wtTM/CT AA |
| 21 | (no SP) Modified SARS-CoV-2 S protein GSAS + PP with H5i Hemagglutinin CT AA |
| 22 | PDI-SARS-CoV-2 S protein GSAS + PP wtTM/CT-DNA |
| 23 | PDI-SARS-CoV-2 S protein GSAS + PP wtTM/CT-AA (product of construct 8591) |
| 24 | IF(PDI)-CoV(opt2).c |
| 25 | IF(AVB)-CoV(opt2).r |
| 26 | PDI-Modified SARS-CoV-2 S protein GSAS + PP H5iTM/CT-DNA |
| 27 | PDI-Modified SARS-CoV-2 S protein GSAS + PP H5iTM/CT-AA (product of construct 8597) |
| 28 | IF(Avb)-H5I.r |
| 29 | PDI-Modified SARS-CoV-2 S protein GSAS + PP wtTM/H5iCT-DNA |
| 30 | PDI-Modified SARS-CoV-2 S protein GSAS + PP wtTM/H5iCT-AA (product of construct 8671) |
| 31 | Cloning vector 8501 from left to right T-DNA |
| 32 | Construct 8586 from 2X35S(+C) prom to NOS term |
| 33 | Cloning vector 8500 from left to right T-DNA] |
| 34 | Construct 8589 from 2X35S(+C) prom to NOS term |
| 35 | Cloning vector 8716 from left to right T-DNA |
| 36 | Construct 8591 from 2X35S(+C) prom to NOS term |
| 37 | C-Terminal Region of Modified S protein with H5i Hemagglutinin CT (alternative 2) |
| 38 | C-Terminal Region of Modified S protein with H5i Hemagglutinin CT (alternative 3) |
| 39 | C-Terminal Region of Modified S protein with H5i Hemagglutinin CT (alternative 4) |
| 40 | 3′UTR AvB (Arracacha Virus B Isolate) |
| 41 | 3′UTR trBNYVV (Beet necrotic yellow vein virus) |
| 42 | 3′ UTR SBMV (Southern bean mosaic virus) |
| 43 | 3′ UTR TuRSV (Turnip ringspot virus) |
| 44 | 3′ UTR CPMV (Cowpea Mosaic virus) |
| 45 | 3′ BBTMV (Broad bean true mosaic virus) |
| 46 | 3′ UTR trOUMV (Ourmia melon virus) |
| | Modified S Protein with Substitutions |
| 47 | PDI-S Protein GSAS-2P (product of construct 8671) |
| 48 | PDI-S Protein GSAS-4P (product of construct 8953) |
| 49 | PDI-S Protein GSAS-6P (product of construct 8940) |
| 50 | PDI-S Protein GSAS-2P-923 (product of construct 8933) |
| 51 | PDI-S Protein GSAS-4P-923 (product of construct 8960) |
| 52 | PDI-S Protein GSAS-6P-923 (product of construct 8947) |
| | Modified S with CT from different HA strains |
| 53 | PDI-S-protein + H1 Cal (product of construct 7390) |
| 54 | PDI-S-protein + H3 Minn (product of construct 7391) |
| 55 | PDI-S-protein + H6 HK (product of construct 7392) |
| 56 | PDI-S-protein + H7 Guangdong (product of construct 7393) |
| 57 | PDI-S-protein + H9 HK (product of construct 7394) |
| 58 | PDI-S-protein + B/Wash (product of construct 7395) |
| | Modified S Protein C-terminal variations |
| 59 | PDI-Modified S protein with H5i Hemagglutinin CT (V1) (product of construct 8980) |
| 60 | PDI-Modified S protein with H5i Hemagglutinin CT (V2) (product of construct 8981) |
| 61 | PDI-Modified S protein with H5i Hemagglutinin CT (V3) (product of construct 8982) |
| 62 | PDI-Modified S protein with H5i Hemagglutinin CT (V4) (product of construct 8983) |
| | N-terminal region |
| 63 | N-terminal region of native SARS-CoV-2 protein (including native signal peptide) |
| 64 | TM/CT Region of Modified SARS-CoV-2 S protein with intervening peptide sequence Xₙ |
| | Modified S Protein with Substitutions (DNA) |
| 65 | PDI-S Protein GSAS + 4P-DNA |
| 66 | PDI-S Protein GSAS + 6P-DNA |
| 67 | PDI-S Protein GSAS + 2P + L923F-DNA |
| 68 | PDI-S Protein GSAS + 4P + L923F-DNA |
| 69 | PDI-S Protein GSAS + 6P + L923F-DNA |
| | Modified S Protein C-terminal variations (DNA) |
| 70 | PDI-Modified S protein with H5i Hemagglutinin CT (V1) DNA |
| 71 | PDI-Modified S protein with H5i Hemagglutinin CT (V2) DNA |
| 72 | PDI-Modified S protein with H5i Hemagglutinin CT (V3) DNA |
| 73 | PDI-Modified S protein with H5i Hemagglutinin CT (V4) DNA |
| | Modified S with CT from different HA strains (DNA) and Primers |
| 74 | PDI-S-protein + H1 Cal DNA |
| 75 | PDI-S-protein + H3 Minn DNA |
| 76 | PDI-S-protein + H6 HK DNA |
| 77 | PDI-S-protein + H7 Guangdong DNA |
| 78 | PDI-S-protein + H9 HK DNA |
| 79 | PDI-S-protein + B/Wash DNA |
| 80 | IF-H1HawaiiCT.r |
| 81 | IF-H3MinnesotaCT.r |
| 82 | IF-HongKongCT.r |
| 83 | IF-GuangdongCT.r |
| 84 | IF-H9HKCT.r |
| 85 | IF-BWashCT.r |
| | Modified SARS-COV-1 S Protein (DNA) and Primers |
| 86 | IF(nbHEL40)-PDI.c |
| 87 | IF(AvB + wtCT).r |
| 88 | PDI-SARS-COV-1 wtTMCT-DNA |
| 89 | PDI-SARS-COV-1 H5iTMCT-DNA |
| 90 | PDI-SARS-COV-1 H5iCT-DNA |
| 91 | PDI-SARS-COV-1 H5iCT(V4)-DNA |
| 92 | PDI-SARS-COV-1 H1cCT-DNA |
| | Modified SARS-COV-1 S Protein (AA) |
| 93 | PDI-SARS-COV-1 wtTMCT-AA |
| 94 | PDI-SARS-COV-1 H5iTMCT-AA |
| 95 | PDI-SARS-COV-1 H5iCT-AA |
| 96 | PDI-SARS-COV-1 H5iCT(V4)-AA |
| 97 | PDI-SARS-COV-1 H1cCT-AA |
| | Modified MERS S Protein (DNA) and Primers |
| 98 | IF(AvB + wtCT-MERS).r |
| 99 | IF(H1cCT-wtTM).r |
| 100 | IF(H5ITMCT).r |
| 101 | PDI-MERS-wtTMCT-DNA |
| 102 | PDI-MERS-H5iTMCT-DNA |
| 103 | PDI-MERS-H5iCT-DNA |
| 104 | PDI-MERS-H5iCT(V4)-DNA |
| 105 | PDI-MERS-H1cCT-DNA |
| | Modified SARS-COV-1 S Protein (AA) |
| 106 | PDI-MERS-wtTMCT-AA |
| 107 | PDI-MERS-H5iTMCT-AA |
| 108 | PDI-MERS-H5iCT-AA |
| 109 | PDI-MERS-H5iCT(V4)-AA |
| 110 | PDI-MERS-H1cCT-AA |
| | Other Sequences |
| 111 | Cloning vector 7147 from left to right T-DNA |
| 112 | Native SARS-CoV-1 S protein wtTM/CT AA (P59594) |
| 113 | Native MERS S protein wtTM/CT AA (AFY13307) |
| 114 | Native SARS-CoV-1 S protein wtTM/CT AA (P59594) without signal peptide |
| 115 | Native MERS S protein wtTM/CT AA (AFY13307) without signal peptide |
| 116 | TMCT region of modified PDI-SARS-COV-1 wtTMCT-AA |
| 117 | TMCT region of modified PDI-SARS-COV-1 H5iTMCT-AA |
| 118 | TMCT region of modified PDI-SARS-COV-1 H5iCT-AA |
| 119 | TMCT region of modified PDI-SARS-COV-1 H5iCT(V4)-AA |
| 120 | TMCT region of modified PDI-SARS-COV-1 H1cCT-AA |
| 121 | TMCT region of modified PDI-MERS-wtTMCT-AA |
| 122 | TMCT region of modified PDI-MERS-H5iTMCT-AA |
| 123 | TMCT region of modified PDI-MERS-H5iCT-AA |
| 124 | TMCT region of modified PDI-MERS-H5iCT(V4)-AA |
| 125 | TMCT region of modified PDI-MERS-H1cCT-AA |
| 126 | TMCT region of modified PDI-S-protein + H1 Cal |
| 127 | TMCT region of modified PDI-S-protein + H3 Minn |
| 128 | TMCT region of modified PDI-S-protein + H6 HK |
| 129 | TMCT region of modified PDI-S-protein + H7 Guangdong |
| 130 | TMCT region of modified PDI-S-protein + H9 HK |
| 131 | TMCT region of modified PDI-S-protein + B/Wash |
| 132 | Consensus Sequence of TM Domain of Coronavirus S-protein |
| 133 | Consensus Sequence of TM Domain of Coronavirus S-protein |
| 134 | TM/CT Region of Modified SARS-CoV-1 S protein with intervening peptide sequence Xₙ |
| 135 | TM/CT Region of Modified MERS S protein with intervening peptide sequence Xₙ |
| | Modified OC43-CoV S Protein (DNA) and Primers |
| 136 | IF(AvB + wtCT-OC43).r |
| 137 | PDI-OC43-wtTMCT-DNA |
| 138 | PDI-OC43-H5iTMCT-DNA |
| 139 | PDI-OC43-H5iCT-DNA |
| 140 | PDI-OC43-H5iCT(V4)-DNA |
| 141 | PDI-OC43-H1cCT-DNA |
| | Modified OC43-CoV S Protein (AA) |
| 142 | PDI-OC43-wtTMCT-AA |
| 143 | PDI-OC43-H5iTMCT-AA |
| 144 | PDI-OC43-H5iCT-AA |
| 145 | PDI-OC43-H5iCT(V4)-AA |
| 146 | PDI-OC43-HlcCT-AA |
| | Modified 229E-CoV S Protein (DNA) and Primers |
| 147 | IF(CoV229EwtCT).r |
| 148 | PDI-229E -wtTMCT-DNA |
| 149 | PDI-229E -H5iTMCT-DNA |
| 150 | PDI-229E -H5iCT-DNA |
| 151 | PDI-229E -H5iCT(V4)-DNA |
| 152 | PDI-229E -H1cCT-DNA |
| | Modified 229E-CoV S Protein (AA) |
| 153 | PDI-229E -wtTMCT-AA |
| 154 | PDI-229E -H5iTMCT-AA |
| 155 | PDI-229E -H5iCT-AA |
| 156 | PDI-229E -H5iCT(V4)-AA |
| 157 | PDI-229E-H1cCT-AA |
| | Other Sequences |
| 158 | Native OC43-CoV S protein wtTM/CT AA (AVR40344) |
| 159 | Native 229E S protein wtTM/CT AA (P15423) |
| 160 | Native OC43-CoV S protein wtTM/CT AA (AVR40344) without signal peptide |
| 161 | Native 229E S protein wtTM/CT AA (P15423) without signal peptide |
| 162 | TMCT region of modified PDI-OC43-COV wtTMCT-AA |
| 163 | TMCT region of modified PDI-OC43-COV H5iTMCT-AA |
| 164 | TMCT region of modified PDI-OC43-COV H5iCT-AA |
| 165 | TMCT region of modified PDI-OC43-COV H5iCT(V4)-AA |
| 166 | TMCT region of modified PDI-OC43-COV HIcCT-AA |
| 167 | TMCT region of modified PDI-229E-wtTMCT-AA |
| 168 | TMCT region of modified PDI-229E-H5iTMCT-AA |
| 169 | TMCT region of modified PDI-229E-H5iCT-AA |
| 170 | TMCT region of modified PDI-229E-H5iCT(V4)-AA |
| 171 | TMCT region of modified PDI-229E-H1cCT-AA |
| 172 | TM/CT Region of Modified OC43-CoV S protein with intervening peptide sequence Xₙ |
| 173 | TM/CT Region of Modified 229E-CoV S protein with intervening peptide sequence Xₙ |

[0391] The present invention will be further illustrated in the following examples.

### EXAMPLES

### Example 1: Preparation of Modified Structural Protein Constructs

[0392] The SARS-CoV-2 S protein constructs were produced using techniques well known within the art. For example SARS-COV-2 Spike Protein with wtTMCT (Constructs number 8586, 8589, 8591, see FIG. 8A-8C) were cloned as described below. Constructs for SARS-COV-2 Spike Protein with H5iTMCT (Constructs number 8592, 8595, 8597, see FIG. 9A-9C) and constructs for SARS-COV-2 Spike Protein with H5iCT (Constructs number 8610, 8611, 8671, see FIG. 10A-10C) were obtained using similar techniques and sequences primers, templates and products are described in Table 5.

SARS-COV-2 Spike Protein with wtTMCT (Constructs Number 8586, 8589, 8591)

[0393] A sequence encoding mature SARS-CoV-2 Spike (S) protein 2 (SEQ ID NO: 23) with GSAS+K971P+V972P ectodomain mutations and with native transmembrane domain and native cytoplasmic tail (wtTMCT) from SARS-CoV-2, fused to alfalfa PDI secretion signal peptide (PDISP) was cloned into three different expression systems using the following PCR-based method. A fragment containing the SARS-COV-2 Spike protein (wtTMCT) coding sequence was amplified using primers IF(PDI)-CoV(opt2).c (SEQ ID NO: 24) and IF(AVB)-CoV(opt2).r (SEQ ID NO: 25), using PDISP-SARS-COV-2 Spike Protein with wtTMCT gene sequence (SEQ ID NO: 22) as template. The PCR product was cloned into three different expression systems using In-Fusion cloning system (Clontech, Mountain View, CA).

[0394] For the first expression system, construct number 8501 (FIG. 7A), was digested with AatII and StuI restriction enzymes and the linearized plasmid was used for the first In-Fusion assembly reaction. Construct number 8501 is an acceptor plasmid intended for “In Fusion” cloning of genes of interest in a 2λ35S(+C)/nbMT78/PDI/AvB/NOS-based expression cassette. This acceptor plasmid also incorporates a gene construct for the co-expression of the TBSV P19 suppressor of silencing under the alfalfa Plastocyanin gene promoter and terminator. The backbone is a pCAMBIA binary plasmid and the sequence from left to right t-DNA borders is presented in SEQ ID NO: 31. The resulting construct was given number 8586 (SEQ ID NO: 32). The amino acid sequence of mature spike protein from SARS-COV-2 fused to alfalfa PDI secretion signal peptide (PDISP) is presented in SEQ ID NO: 23. A representation of plasmid 8586 is presented in FIG. 8A.

[0395] For the second expression system, construct number 8500 (FIG. 7B), was also digested with AatII and StuI restriction enzymes and the linearized plasmid was used for the second In-Fusion assembly reaction. Construct number 8500 is an acceptor plasmid intended for “In Fusion” cloning of genes of interest in a 2λ35S(+C)/nbCSY65/PDI/AvB/NOS-based expression cassette. This acceptor plasmid also incorporates a gene construct for the co-expression of the TBSV P19 suppressor of silencing under the alfalfa Plastocyanin gene promoter and terminator. The backbone is a pCAMBIA binary plasmid and the sequence from left to right t-DNA borders is presented in SEQ ID NO: 33. The resulting construct was given number 8589 (SEQ ID NO: 34). The amino acid sequence of mature spike protein from SARS-COV-2 fused to alfalfa PDI secretion signal peptide (PDISP) is presented in SEQ ID NO: 23. A representation of plasmid 8589 is presented in FIG. 8B.

[0396] For the third expression system, construct number 8716 (FIG. 7C), was also digested with AatII and StuI restriction enzymes and the linearized plasmid was used for the third In-Fusion assembly reaction. Construct number 8716 is an acceptor plasmid intended for “In Fusion” cloning of genes of interest in a 2λ35S(+C)/nbHEL40/PDI/AvB/NOS based expression cassette. This acceptor plasmid also incorporates a gene construct for the co-expression of the TBSV P19 suppressor of silencing under the alfalfa Plastocyanin gene promoter and terminator. The backbone is a pCAMBIA binary plasmid and the sequence from left to right t-DNA borders is presented in SEQ ID NO: 35. The resulting construct was given number 8591 (SEQ ID NO: 36). The amino acid sequence of mature spike protein from SARS-COV-2 fused to alfalfa PDI secretion signal peptide (PDISP) is presented in SEQ ID NO: 23. A representation of plasmid 8591 is presented in FIG. 8C.

SARS-COV-2 Spike Protein with H5iTMCT (Constructs Number 8592, 8595, 8597)

[0397] A sequence encoding mature Spike (S) protein from SARS-CoV-2 (SEQ ID NO: 27) with GSAS+K971P+V972P ectodomain mutations, and with transmembrane domain and cytoplasmic tail from H5 A/Indonesia/5/05 HA (H5iTMCT), was fused to alfalfa PDI secretion signal peptide (PDISP) and cloned into the same three expression systems described above by a similar PCR-based method (see table 5 for primers and Example 3 for sequences used). Construct number 8592 (FIG. 9A) was derived from acceptor construct 8501, construct number 8595 (FIG. 9B) was derived from acceptor construct 8500 and construct number 8597 (FIG. 9C) was derived from acceptor construct 8716 using similar techniques as described above and the primers, templates and products is provided in Table 5 below.

SARS-COV-2 Spike Protein with H5iCT (Constructs Number 8610, 8611, 8671)

[0398] A sequence encoding mature Spike (S) protein from SARS-CoV-2 (SEQ ID NO: 30) with GSAS+K971P+V972P ectodomain mutations, and cytoplasmic tail from H5 A/Indonesia/5/05 HA (H5iCT), was fused to alfalfa PDI secretion signal peptide (PDISP) and cloned into the same three expression systems as described above by a similar PCR-based method (see table 5 for primers and Example 3 for sequences used). Construct number 8610 (FIG. 10A) was derived from acceptor construct 8501, construct number 8611 (FIG. 10B) was derived from acceptor construct 8500 and construct number 8671 (FIG. 10C) was derived from acceptor construct 8716 using similar techniques as described above and the primers, templates and products is provided in Table 5 below.

SARS-COV-2 Spike Protein with Alternative TM CT Fusion Sequences (Constructs Number 8980, 8981, 8982, 8983)

[0399] A sequence encoding mature Spike (S) protein from SARS-CoV-2 with GSAS+K971P+V972P ectodomain mutations, and cytoplasmic tail from H5 A/Indonesia/5/05 HA (H5iCT), as depicted in SEQ ID NO: 19, was fused to alfalfa PDI secretion signal peptide (PDISP) and cloned into the same expression system as described for construct 8671, yielding construct 8980 (FIG. 12A). Similar constructs were created for a sequence encoding mature Spike (S) protein from SARS-CoV-2 with GSAS+K971P+V972P ectodomain mutations, and cytoplasmic tail from H5 A/Indonesia/5/05 HA (H5iCT), as depicted in SEQ ID NO: 37 (construct 8981, FIG. 12B), SEQ ID NO: 38 (construct 8982, FIG. 12C), and SEQ ID NO: 39 (construct 8983, FIG. 12D).

SARS-COV-2 Spike Protein with CT from Other HA Strains (Constructs Number 7390, 7391, 7392, 7393, 7394, and 7395)

[0400] A sequence encoding mature Spike (S) protein from SARS-CoV-2 with GSAS+K971P+V972P ectodomain mutations, and cytoplasmic tail from H1 A/California/7/2009 HA (H1CT), was fused to alfalfa PDI secretion signal peptide (PDISP) and cloned into the same expression system as described for construct 8671 above by a similar PCR-based method (see table 5 for primers and Example 3 for sequences used). The resulting construct 7390 thus encodes a modified S protein comprising a H1 A/California/7/2009 HA cytoplasmic tail (H1CT) (FIG. 13A). Similar constructs were created for H3 A/Minnesota/41/2019 (Construct 7391, H3 CT) (FIG. 13B), H6 A/Teal/Hong Kong/W312/97 (Construct 7392, H6 CT) (FIG. 13C), H7 A/Guangdong/17SF003/2016 (Construct 7393, H7 CT) (FIG. 13D), H9 A/Hong Kong/1073/99 (Construct 7394, H9h CT) (FIG. 13E) or B/Washington/02/2019 (Construct 7395, HA B CT) (FIG. 13F).

SARS-COV-2 Spike Protein with Substitutions (Constructs Numbers 8933, 8960, 8947)

[0401] Modified SARS-CoV-2 S protein constructs comprising combinations of mutations in the S protein, such as R667G, R668S, R670S, F802P, A877P, A884P, A927P, K971P, V972P, and L923F were produced using techniques well known within the art and basically as described above. The constructs have the following substitutions: Construct 8933: R667G, R668S, R670S, K971P, V972P and L923F (“GSAS-2P-923”); construct 8960: R667G, R668S, R670S, F802P, A927P, K971P, V972P and L923F (“GSAS-4P-923”) and construct 8947: R667G, R668S, R670S, F802P, A877P, A884P, A927P, K971P, V972P and L923F (“GSAS-6P-923”).

SARS-COV-1 Spike Protein with wtTMCT and Modified TMCT (Constructs Number 9231, 9232, 9233, 9234, 9235)

[0402] A sequence encoding mature SARS-CoV-1 Spike (S) protein (SEQ ID NO: 88) with R654A+K955P+V956P ectodomain mutations and with native transmembrane domain and native cytoplasmic tail (wtTMCT) from SARS-CoV-1, fused to alfalfa PDI secretion signal peptide (PDISP) was cloned into the following expression system by a PCR-based method. A fragment containing the PDISP-SARS-COV-1 Spike protein (wtTMCT) coding sequence was amplified using primers IF(nbHEL40)-PDI.c (SEQ ID NO: 86) and IF(AvB+wtCT).r (SEQ ID NO: 87), using PDISP-SARS-COV-1 Spike Protein with wtTMCT gene sequence (SEQ ID NO: 88) as template. The PCR product was cloned into the following expression system using In-Fusion cloning system (Clontech, Mountain View, CA).

[0403] Construct number 7147 (FIG. 21) was digested with AatII and StuI restriction enzymes and the linearized plasmid was used for the first In-Fusion assembly reaction. Construct number 7147 is an acceptor plasmid intended for “In Fusion” cloning of genes of interest in a 2λ35S(+C)/nbHEL40/AvB/NOS-based expression cassette. This acceptor plasmid also incorporates a gene construct for the co-expression of the TBSV P19 suppressor of silencing under the alfalfa Plastocyanin gene promoter and terminator. The backbone is a pCAMBIA binary plasmid and the sequence from left to right t-DNA borders is presented in SEQ ID NO: 111. The resulting construct was given number 9231. The amino acid sequence of mature spike protein from SARS-COV-1 fused to alfalfa PDI secretion signal peptide (PDISP) is presented in SEQ ID NO: 93. A representation of plasmid 9231 is presented in FIG. 18A.

[0404] A sequence encoding mature Spike (S) protein from SARS-CoV-1 with R654A+K955P+V956P ectodomain mutations, and either i) transmembrane domain and cytoplasmic tail from H5 A/Indonesia/5/05 HA (H5iTMCT), ii) cytoplasmic tail from H5 A/Indonesia/5/05 HA (H5iCT and variation H5iCT(V4)), or iii) cytoplasmic tail from H1 A/California/7/2009 HA (H1cCT), were fused to alfalfa PDI secretion signal peptide (PDISP) and cloned into the same expression system as described for construct 9231 above by a similar PCR-based method (see table 5 for primers and Example 3 for sequences used). The resulting constructs 9232, 9233, 9234, 9235 thus encode a modified S protein comprising a H5 A/Indonesia/5/05 TMCT (H5iTMCT) (FIG. 18B, SEQ ID NO: 94), a modified SARS-COV-1 S protein comprising a H5 A/Indonesia/5/05 CT (H5iCT) (FIG. 18C, SEQ ID NO: 95), a modified S protein comprising a H5 A/Indonesia/5/05 CT variant (H5iCT(V4)) (FIG. 18D, SEQ ID NO: 96), or a modified S protein comprising a H1 A/California/7/2009 CT (H1cCT) (FIG. 18E, SEQ ID NO: 97.)

MERS-CoV Spike Protein with wtTMCT and Modified TMCT (Constructs Number 9246, 9247, 9249, 9250, 9251)

[0405] A sequence encoding mature MERS-CoV Spike (S) protein (SEQ ID NO: 101) with R730A+R733G+V1043P+L1044P ectodomain mutations and with native transmembrane domain and native cytoplasmic tail (wtTMCT) from MERS-CoV, fused to alfalfa PDI secretion signal peptide (PDISP) was cloned into the following expression system by a PCR-based method. A fragment containing the PDISP-MERS-COV Spike protein (wtTMCT) coding sequence was amplified using primers IF(nbHEL40)-PDI.c (SEQ ID NO: 86) and IF(AvB+wtCT-MERS).r (SEQ ID NO: 98), using PDISP-MERS-COV Spike Protein with wtTMCT gene sequence (SEQ ID NO: 101) as template. The PCR product was cloned into the following expression system using In-Fusion cloning system (Clontech, Mountain View, CA).

[0406] Construct number 7147 (FIG. 21) was digested with AatII and StuI restriction enzymes and the linearized plasmid was used for the first In-Fusion assembly reaction. Construct number 7147 is an acceptor plasmid intended for “In Fusion” cloning of genes of interest in a 2λ35S(+C)/nbHEL40/AvB/NOS-based expression cassette. This acceptor plasmid also incorporates a gene construct for the co-expression of the TBSV P19 suppressor of silencing under the alfalfa Plastocyanin gene promoter and terminator. The backbone is a pCAMBIA binary plasmid and the sequence from left to right t-DNA borders is presented in SEQ ID NO: 111. The resulting construct was given number 9246. The amino acid sequence of mature spike protein from MERS-COV fused to alfalfa PDI secretion signal peptide (PDISP) is presented in SEQ ID NO: 106. A representation of plasmid 9246 is presented in FIG. 20A.

[0407] A sequence encoding mature Spike (S) protein from MERS-CoV with R730A+R733G+V1043P+L1044P ectodomain mutations, and either i) transmembrane domain and cytoplasmic tail from H5 A/Indonesia/5/05 HA (H5iTMCT), ii) cytoplasmic tail from H5 A/Indonesia/5/05 HA (H5iCT and variation H5iCT(V4)), or iii) cytoplasmic tail from H1 A/California/7/2009 HA (H1cCT), were fused to alfalfa PDI secretion signal peptide (PDISP) and cloned into the same expression system as described for construct 9246 above by a similar PCR-based method (see table 5 for primers and Example 3 for sequences used). The resulting constructs 9247, 9249, 9250, 9251 thus encode a modified MERS-COV S protein comprising a H5 A/Indonesia/5/05 TMCT (H5iTMCT) (FIG. 20B, SEQ ID NO: 107), a modified S protein comprising a H5 A/Indonesia/5/05 CT (H5iCT) (FIG. 20C, SEQ ID NO: 108), a modified S protein comprising a H5 A/Indonesia/5/05 CT variant (H5iCT(V4)) (FIG. 20D, SEQ ID NO: 109), or a modified S protein comprising a H1 A/California/7/2009 CT (H1cCT) (FIG. 20E, SEQ ID NO: 110.)

OC43-CoV Spike Protein with wtTMCT and Modified TMCT (Constructs Number 9269, 9270, 9272, 9273 and 9274)

[0408] A sequence encoding mature OC43-CoV Spike (S) protein (SEQ ID NO: 137) with R761G+R762G+R764G+R765S+A1077P+L1078P ectodomain mutations and with native transmembrane domain and native cytoplasmic tail (wtTMCT) from OC43-CoV, fused to alfalfa PDI secretion signal peptide (PDISP) was cloned into the following expression system by a PCR-based method. A fragment containing the PDISP-OC43-COV Spike protein (wtTMCT) coding sequence was amplified using primers IF(nbHEL40)-PDI.c (SEQ ID NO: 86) and IF(AvB+wtCT-OC43).r (SEQ ID NO: 136), using PDISP-OC43-COV Spike Protein with wtTMCT gene sequence (SEQ ID NO: 137) as template. The PCR product was cloned into the following expression system using In-Fusion cloning system (Clontech, Mountain View, CA).

[0409] Construct number 7147 (FIG. 21) was digested with AatII and StuI restriction enzymes and the linearized plasmid was used for the first In-Fusion assembly reaction. Construct number 7147 is an acceptor plasmid intended for “In Fusion” cloning of genes of interest in a 2λ35S(+C)/nbHEL40/AvB/NOS-based expression cassette. This acceptor plasmid also incorporates a gene construct for the co-expression of the TBSV P19 suppressor of silencing under the alfalfa Plastocyanin gene promoter and terminator. The backbone is a pCAMBIA binary plasmid and the sequence from left to right t-DNA borders is presented in SEQ ID NO: 111. The resulting construct was given number 9269. The amino acid sequence of mature spike protein from OC43-COV fused to alfalfa PDI secretion signal peptide (PDISP) is presented in SEQ ID NO: 142. A representation of plasmid 9269 is presented in FIG. 24A.

[0410] A sequence encoding mature Spike (S) protein from OC43-CoV with R761G+R762G+R764G+R765S+A1077P+L1078P ectodomain mutations, and either i) transmembrane domain and cytoplasmic tail from H5 A/Indonesia/5/05 HA (H5iTMCT), ii) cytoplasmic tail from H5 A/Indonesia/5/05 HA (H5iCT and variation H5iCT(V4)), or iii) cytoplasmic tail from H1 A/California/7/2009 HA (H1cCT), were fused to alfalfa PDI secretion signal peptide (PDISP) and cloned into the same expression system as described for construct 9269 above by a similar PCR-based method (see table 5 for primers and Example 3 for sequences used). The resulting constructs 9270, 9272, 9273 and 9274 thus encode a modified OC43-COV S protein comprising a H5 A/Indonesia/5/05 TMCT (H5iTMCT) (FIG. 24B, SEQ ID NO: 143), a modified S protein comprising a H5 A/Indonesia/5/05 CT (H5iCT) (FIG. 24C, SEQ ID NO: 144), a modified S protein comprising a H5 A/Indonesia/5/05 CT variant (H5iCT(V4)) (FIG. 24D, SEQ ID NO: 145), or a modified S protein comprising a H1 A/California/7/2009 CT (H1cCT) (FIG. 24E, SEQ ID NO: 146).

229E-CoV Spike Protein with wtTMCT and Modified TMCT (Constructs Number 9310, 9311, 9312, 9313 and 9314)

[0411] A sequence encoding mature 229E-CoV Spike (S) protein (SEQ ID NO: 148) with R567A+T871P+I872P ectodomain mutations and with native transmembrane domain and native cytoplasmic tail (wtTMCT) from 229E-CoV, fused to alfalfa PDI secretion signal peptide (PDISP) was cloned into the following expression system by a PCR-based method. A fragment containing the PDISP-229E-COV Spike protein (wtTMCT) coding sequence was amplified using primers IF(nbHEL40)-PDI.c (SEQ ID NO: 86) and IF(CoV229EwtCT).r (SEQ ID NO: 147), using PDISP-OC43-COV Spike Protein with wtTMCT gene sequence (SEQ ID NO: 148) as template. The PCR product was cloned into the following expression system using In-Fusion cloning system (Clontech, Mountain View, CA).

[0412] Construct number 7147 (FIG. 21) was digested with AatII and StuI restriction enzymes and the linearized plasmid was used for the first In-Fusion assembly reaction. Construct number 7147 is an acceptor plasmid intended for “In Fusion” cloning of genes of interest in a 2λ35S(+C)/nbHEL40/AvB/NOS-based expression cassette. This acceptor plasmid also incorporates a gene construct for the co-expression of the TBSV P19 suppressor of silencing under the alfalfa Plastocyanin gene promoter and terminator. The backbone is a pCAMBIA binary plasmid and the sequence from left to right t-DNA borders is presented in SEQ ID NO: 111. The resulting construct was given number 9310. The amino acid sequence of mature spike protein from 229E-COV fused to alfalfa PDI secretion signal peptide (PDISP) is presented in SEQ ID NO: 153. A representation of plasmid 9310 is presented in FIG. 26A.

[0413] A sequence encoding mature Spike (S) protein from 229E-CoV with R567A+T871P+I872P ectodomain mutations, and either i) transmembrane domain and cytoplasmic tail from H5 A/Indonesia/5/05 HA (H5iTMCT), ii) cytoplasmic tail from H5 A/Indonesia/5/05 HA (H5iCT and variation H5iCT(V4)), or iii) cytoplasmic tail from H1 A/California/7/2009 HA (H1cCT), were fused to alfalfa PDI secretion signal peptide (PDISP) and cloned into the same expression system as described for construct 9310 above by a similar PCR-based method (see table 5 for primers and Example 3 for sequences used). The resulting constructs 9311, 9312, 9313 and 9314 thus encode a modified 229E-COV S protein comprising a H5 A/Indonesia/5/05 TMCT (H5iTMCT) (FIG. 26B, SEQ ID NO: 154), a modified S protein comprising a H5 A/Indonesia/5/05 CT (H5iCT) (FIG. 26C, SEQ ID NO: 155), a modified S protein comprising a H5 A/Indonesia/5/05 CT variant (H5iCT(V4)) (FIG. 26D, SEQ ID NO: 156), or a modified S protein comprising a H1 A/California/7/2009 CT (H1cCT) (FIG. 26E, SEQ ID NO: 157).

TABLE 5
List of Construct Numbers, Primer and Templates

| | | | | Primer 1 | Primer 2 | Template | | |
|---|---|---|---|---|---|---|---|---|
| | | Gene of | | (forward | (reverse | for first | | |
| | | interest | | primer of | primer of | PCR/Resuting | Resulting | Acceptor |
| Construct # | 5′ UTR | (GOI) | TMCT Region | fragment 1) | fragment 1) | gene | protein | plasmid |
| 8586 | nbMT78 | SARS-CoV-2 S | wt TMCT | SEQ ID | SEQ ID | SEQ ID | SEQ ID | SEQ ID |
| | | | | NO: 24 | NO: 25 | NO: 22 | NO: 23 | NO: 31 |
| 8589 | nbCSY65 | SARS-CoV-2 S | wt TMCT | SEQ ID | SEQ ID | SEQ ID | SEQ ID | SEQ ID |
| | | | | NO: 24 | NO: 25 | NO: 22 | NO: 23 | NO: 33 |
| 8591 | nbHEL40 | SARS-CoV-2 S | wt TMCT | SEQ ID | SEQ ID | SEQ ID | SEQ ID | SEQ ID |
| | | | | NO: 24 | NO: 25 | NO: 22 | NO: 23 | NO: 35 |
| 8592 | nbMT78 | SARS-CoV-2 S | H5iTMCT | SEQ ID | SEQ ID | SEQ ID | SEQ ID | SEQ ID |
| | | | | NO: 24 | NO: 28 | NO: 26 | NO: 27 | NO: 31 |
| 8595 | nbCSY65 | SARS-CoV-2 S | H5iTMCT | SEQ ID | SEQ ID | SEQ ID | SEQ ID | SEQ ID |
| | | | | NO: 24 | NO: 28 | NO: 26 | NO: 27 | NO: 33 |
| 8597 | nbHEL40 | SARS-CoV-2 S | H5iTMCT | SEQ ID | SEQ ID | SEQ ID | SEQ ID | SEQ ID |
| | | | | NO: 24 | NO: 28 | NO: 26 | NO: 27 | NO: 35 |
| 8610 | nbMT78 | SARS-CoV-2 S | wtTM/H5iCT | SEQ ID | SEQ ID | SEQ ID | SEQ ID | SEQ ID |
| | | | | NO: 24 | NO: 28 | NO: 29 | NO: 30 | NO: 31 |
| 8611 | nbCSY65 | SARS-CoV-2 S | wtTM/H5iCT | SEQ ID | SEQ ID | SEQ ID | SEQ ID | SEQ ID |
| | | | | NO: 24 | NO: 28 | NO: 29 | NO: 30 | NO: 33 |
| 8671 | nbHEL40 | SARS-CoV-2 S | wtTM/H5iCT | SEQ ID | SEQ ID | SEQ ID | SEQ ID | SEQ ID |
| | | | | NO: 24 | NO: 28 | NO: 29 | NO: 30 | NO: 35 |
| 8953 | nbHEL40 | SARS-CoV-2 S | wtTM/H5iCT | SEQ ID | SEQ ID | SEQ ID | SEQ ID | SEQ ID |
| | | | | NO: 24 | NO: 28 | NO: 65 | NO: 48 | NO: 35 |
| 8940 | nbHEL40 | SARS-CoV-2 S | wtTM/H5iCT | SEQ ID | SEQ ID | SEQ ID | SEQ ID | SEQ ID |
| | | | | NO: 24 | NO: 28 | NO: 66 | NO: 49 | NO: 35 |
| 8933 | nbHEL40 | SARS-CoV-2 S | wtTM/H5iCT | SEQ ID | SEQ ID | SEQ ID | SEQ ID | SEQ ID |
| | | | | NO: 24 | NO: 28 | NO: 67 | NO: 50 | NO: 35 |
| 8960 | nbHEL40 | SARS-CoV-2 S | wtTM/H5iCT | SEQ ID | SEQ ID | SEQ ID | SEQ ID | SEQ ID |
| | | | | NO: 24 | NO: 28 | NO: 68 | NO: 51 | NO: 35 |
| 8947 | nbHEL40 | SARS-CoV-2 S | wtTM/H5iCT | SEQ ID | SEQ ID | SEQ ID | SEQ ID | SEQ ID |
| | | | | NO: 24 | NO: 28 | NO: 69 | NO: 52 | NO: 35 |
| 8980 | nbHEL40 | SARS-CoV-2 S | wtTM/H5iCT (V1) | SEQ ID | SEQ ID | SEQ ID | SEQ ID | SEQ ID |
| | | | | NO: 24 | NO: 28 | NO: 70 | NO: 59 | NO: 35 |
| 8981 | nbHEL40 | SARS-CoV-2 S | wtTM/H5iCT (V2) | SEQ ID | SEQ ID | SEQ ID | SEQ ID | SEQ ID |
| | | | | NO: 24 | NO: 28 | NO: 71 | NO: 60 | NO: 35 |
| 8982 | nbHEL40 | SARS-CoV-2 S | wtTM/H5iCT (V3) | SEQ ID | SEQ ID | SEQ ID | SEQ ID | SEQ ID |
| | | | | NO: 24 | NO: 28 | NO: 72 | NO: 61 | NO: 35 |
| 8983 | nbHEL40 | SARS-CoV-2 S | wtTM/H5iCT (V4) | SEQ ID | SEQ ID | SEQ ID | SEQ ID | SEQ ID |
| | | | | NO: 24 | NO: 28 | NO: 73 | NO: 62 | NO: 35 |
| 7390 | nbHEL40 | SARS-CoV-2 S | wtTM/H1cCT | SEQ ID | SEQ ID | SEQ ID | SEQ ID | SEQ ID |
| | | | | NO: 24 | NO: 80 | NO: 74 | NO: 53 | NO: 35 |
| 7391 | nbHEL40 | SARS-CoV-2 S | wtTM/H3mCT | SEQ ID | SEQ ID | SEQ ID | SEQ ID | SEQ ID |
| | | | | NO: 24 | NO: 81 | NO: 75 | NO: 54 | NO: 35 |
| 7392 | nbHEL40 | SARS-CoV-2 S | wtTM/H6hkCT | SEQ ID | SEQ ID | SEQ ID | SEQ ID | SEQ ID |
| | | | | NO: 24 | NO: 82 | NO: 76 | NO: 55 | NO: 35 |
| 7393 | nbHEL40 | SARS-CoV-2 S | wtTM/H7gCT | SEQ ID | SEQ ID | SEQ ID | SEQ ID | SEQ ID |
| | | | | NO: 24 | NO: 83 | NO: 77 | NO: 56 | NO: 35 |
| 7394 | nbHEL40 | SARS-CoV-2 S | wtTM/H9hkCT | SEQ ID | SEQ ID | SEQ ID | SEQ ID | SEQ ID |
| | | | | NO: 24 | NO: 84 | NO: 78 | NO: 57 | NO: 35 |
| 7395 | nbHEL40 | SARS-CoV-2 S | wtTM/BwCT | SEQ ID | SEQ ID | SEQ ID | SEQ ID | SEQ ID |
| | | | | NO: 24 | NO: 85 | NO: 79 | NO: 58 | NO: 35 |
| 9231 | nbHEL40 | SARS-CoV-1 S | wtTMCT | SEQ ID | SEQ ID | SEQ ID | SEQ ID | SEQ ID |
| | | | | NO: 86 | NO: 87 | NO: 88 | NO: 93 | NO: 111 |
| 9232 | nbHEL40 | SARS-CoV-1 S | H5iTMCT | SEQ ID | SEQ ID | SEQ ID | SEQ ID | SEQ ID |
| | | | | NO: 86 | NO: 28 | NO: 89 | NO: 94 | NO: 111 |
| 9233 | nbHEL40 | SARS-CoV-1 S | wtTM/H5iCT | SEQ ID | SEQ ID | SEQ ID | SEQ ID | SEQ ID |
| | | | | NO: 86 | NO: 28 | NO: 90 | NO: 95 | NO: 111 |
| 9234 | nbHEL40 | SARS-CoV-1 S | wtTM/H5iCT (V4) | SEQ ID | SEQ ID | SEQ ID | SEQ ID | SEQ ID |
| | | | | NO: 86 | NO: 28 | NO: 91 | NO: 96 | NO: 111 |
| 9235 | nbHEL40 | SARS-CoV-1 S | wtTM/H1cCT | SEQ ID | SEQ ID | SEQ ID | SEQ ID | SEQ ID |
| | | | | NO: 86 | NO: 80 | NO: 92 | NO: 97 | NO: 111 |
| 9246 | nbHEL40 | MERS S | wtTMCT | SEQ ID | SEQ ID | SEQ ID | SEQ ID | SEQ ID |
| | | | | NO: 86 | NO: 98 | NO: 101 | NO: 106 | NO: 111 |
| 9247 | nbHEL40 | MERS S | H5iTMCT | SEQ ID | SEQ ID | SEQ ID | SEQ ID | SEQ ID |
| | | | | NO: 86 | NO: 100 | NO: 102 | NO: 107 | NO: 111 |
| 9249 | nbHEL40 | MERS S | wtTM/H5iCT | SEQ ID | SEQ ID | SEQ ID | SEQ ID | SEQ ID |
| | | | | NO: 86 | NO: 100 | NO: 103 | NO: 108 | NO: 111 |
| 9250 | nbHEL40 | MERS S | wtTM/H5iCT (V4) | SEQ ID | SEQ ID | SEQ ID | SEQ ID | SEQ ID |
| | | | | NO: 86 | NO: 100 | NO: 104 | NO: 109 | NO: 111 |
| 9251 | nbHEL40 | MERS S | wtTM/H1cCT | SEQ ID | SEQ ID | SEQ ID | SEQ ID | SEQ ID |
| | | | | NO: 86 | NO: 99 | NO: 105 | NO: 110 | NO: 111 |
| 9269 | nbHEL40 | OC43 S | wtTMCT | SEQ ID | SEQ ID | SEQ ID | SEQ ID | SEQ ID |
| | | | | NO: 86 | NO: 136 | NO: 137 | NO: 142 | NO: 111 |
| 9270 | nbHEL40 | OC43 S | H5iTMCT | SEQ ID | SEQ ID | SEQ ID | SEQ ID | SEQ ID |
| | | | | NO: 86 | NO: 100 | NO: 138 | NO: 143 | NO: 111 |
| 9272 | nbHEL40 | OC43 S | wtTM/H5iCT | SEQ ID | SEQ ID | SEQ ID | SEQ ID | SEQ ID |
| | | | | NO: 86 | NO: 100 | NO: 139 | NO: 144 | NO: 111 |
| 9273 | nbHEL40 | OC43 S | wtTM/H5iCT (V4) | SEQ ID | SEQ ID | SEQ ID | SEQ ID | SEQ ID |
| | | | | NO: 86 | NO: 100 | NO: 140 | NO: 145 | NO: 111 |
| 9274 | nbHEL40 | OC43 S | wtTM/H1cCT | SEQ ID | SEQ ID | SEQ ID | SEQ ID | SEQ ID |
| | | | | NO: 86 | NO: 99 | NO: 141 | NO: 146 | NO: 111 |
| 9310 | nbHEL40 | 229E S | wtTMCT | SEQ ID | SEQ ID | SEQ ID | SEQ ID | SEQ ID |
| | | | | NO: 86 | NO: 147 | NO: 148 | NO: 153 | NO: 111 |
| 9311 | nbHEL40 | 229E S | H5iTMCT | SEQ ID | SEQ ID | SEQ ID | SEQ ID | SEQ ID |
| | | | | NO: 86 | NO: 100 | NO: 149 | NO: 154 | NO: 111 |
| 9312 | nbHEL40 | 229E S | WtTM/H5iCT | SEQ ID | SEQ ID | SEQ ID | SEQ ID | SEQ ID |
| | | | | NO: 86 | NO: 100 | NO: 150 | NO: 155 | NO: 111 |
| 9313 | nbHEL40 | 229E S | wtTM/H5iCT (V4) | SEQ ID | SEQ ID | SEQ ID | SEQ ID | SEQ ID |
| | | | | NO: 86 | NO: 100 | NO: 151 | NO: 156 | NO: 111 |
| 9314 | nbHEL40 | 229E S | wtTM/H1cCT | SEQ ID | SEQ ID | SEQ ID | SEQ ID | SEQ ID |
| | | | | NO: 86 | NO: 99 | NO: 152 | NO: 157 | NO: 111 |

### Example 2: Methods

[0414] Agrobacterium tumefaciens Transfection

[0415] Agrobacterium tumefaciens strain AGL1 was transfected by electroporation with the SARS-CoV-2 modified S protein expression vectors using the methods described by D'Aoust et al., 2008 (Plant Biotech. J 6:930-40). Transfected Agrobacterium were grown in YEB medium supplemented with 10 mM 2-(N-morpholino)ethanesulfonic acid (MES), 20 μM acetosyringone, 50 μg/ml kanamycin and 25 μg/ml of carbenicillin pH5.6 to an OD₆₀₀ between 0.6 and 1.6. Agrobacterium suspensions were centrifuged before use and resuspended in infiltration medium (10 mM MgCl₂ and 10 mM MES pH 5.6).

### Preparation of Plant Biomass, Inoculum and Agroinfiltration

[0416] N. benthamiana plants were grown from seeds in flats filled with a commercial peat moss substrate. The plants were allowed to grow in the greenhouse under a 16/8 photoperiod and a temperature regime of 25° C. day/20° C. night. Three weeks after seeding, individual plantlets were picked out, transplanted in pots and left to grow in the greenhouse for three additional weeks under the same environmental conditions.

[0417] Agrobacteria transfected with each expression vector were grown in a YEB medium supplemented with 10 mM 2-(N-morpholino)ethanesulfonic acid (MES), 20 μM acetosyringone, 50 μg/ml kanamycin and 25 μg/ml of carbenicillin pH 5.6 until they reached an OD₆₀₀ between 0.6 and 1.6. Agrobacterium suspensions were centrifuged before use and resuspended in infiltration medium (10 mM MgCl₂ and 10 mM MES pH 5.6) and stored overnight at 4° C. On the day of infiltration, culture batches were diluted in 2.5 culture volumes and allowed to warm before use. Whole plants of N. benthamiana were placed upside down in the bacterial suspension in an air-tight stainless steel tank under a vacuum of 20-40 Torr for 2-min. Plants were returned to the greenhouse for a 6 or 9 day incubation period until harvest.

### Leaf Harvest and Total Protein and VLP Extraction

[0418] Following incubation, the aerial part of plants was harvested, frozen at −80° C. and crushed into pieces. Total soluble proteins were extracted by mechanically homogenizing (Polytron) each sample of frozen-crushed plant material in two volumes of cold 50 mM Tris buffer at pH 8.0+500 mM NaCl, 0.4 μg/ml metabisulfite and 1 mM phenylmethanesulfonyl fluoride. After homogenization, the slurries were centrifuged at 10,000 g for 10 min at 4° C. and these clarified crude extracts (supernatant) kept for analysis.

[0419] The total protein content of clarified crude extracts was determined by the Bradford assay (Bio-Rad, Hercules, California) using bovine serum albumin as the reference standard. Proteins were separated by SDS-PAGE under reducing conditions using Criterion™ TGX Stain-Free™ precast gels (Bio-Rad Laboratories, Hercules, CA). Proteins were visualized by staining the gels with Coomassie Brilliant Blue. Alternatively, proteins were visualized with Gel Doc™ EZ imaging system (Bio-Rad Laboratories, Hercules, CA) and electrotransferred onto polyvinylene difluoride (PVDF) membranes (Roche Diagnostics Corporation, Indianapolis, Indiana) for immunodetection. Prior to immunoblotting, the membranes were blocked with 5% skim milk and 0.1% Tween-20 in Tris-buffered saline (TBS-T) for 16-18 h at 4° C.

[0420] For VLP purification, proteins were extracted from frozen biomass by mechanical extraction using a blender with two volumes of extraction buffer (50 mM Tris buffer at pH 7.0+500 mM NaCl) and pH was lowered to 6.1 using 0.5M citric acid. The slurry was filtered through a large pore nylon filter to remove large debris and centrifuged 5000 g for 5 min at 4° C. The supernatant was collected and centrifuged again at 5000 g for 30 min (4° C.) to remove additional debris and passed through clarification filters. The supernatant was then loaded on a discontinuous iodixanol density gradient. Analytical density gradient centrifugation was performed as follows: 38 mL tubes containing discontinuous iodixanol density gradient in Tris buffer (3 ml at 35%, 3 ml at 30%, 3 ml at 25%, 3 ml at 15% and 5 ml at 10% of iodixanol) were prepared and overlaid with 22 ml of the extracts containing the virus-like particles. The gradients were centrifuged at 120 000 g for 2 hours (4° C.). After centrifugation, 1 mL fractions were collected from the bottom to the top and fractions were analyzed by SDS-PAGE combined with protein staining or Western blot. Fractions 6 to 9 were pooled and buffer-exchanged using Amicon centrifugation device. Protein content is determined by Bradford assay.

### Protein Analysis and Immunoblotting

[0421] Immunoblotting was performed with a first incubation with a primary mAb, (anti-S1, Sino Biological, cat #40150-R007 or anti-S2, Novus biological, cat #NB100-56578) diluted in 2% skim milk in TBS-Tween 20 0.1%. Peroxydase-conjugated goat anti-rabbit (Jackson Immunoresearch, cat #115-035-144) was used as secondary antibody for chemiluminescence detection in 2% skim milk in TBS-Tween 20 0.1% Immunoreactive complexes were detected by chemiluminescence using luminol as the substrate (Roche Diagnostics Corporation). Horseradish peroxidase-enzyme conjugation of human IgG antibody was carried out by using the EZ-Link Plus® Activated Peroxidase conjugation kit (Pierce, Rockford, Ill.).

[0422] In planta yields were assessed on clarified crude extracts and analyzed using a capillary-based electrophoresis method (Protein Simple, BioTechne) technology and a WES analysis system. In brief, soluble proteins from crude extracts were separated by molecular weight in a capillary and fixed to the matrix. A standard curve using purified VLPs is used to determine S protein quantity and Anti-S2 antibody (Novus biological, cat #NB100-56578) is used for detection according to the manufacturer instructions. Yields are then normalized using a comparator construct which is set to 1.

[0423] The primary antibody for detection of SARS-CoV S protein was SARS-CoV Spike S1 subunit antibody from Sino Biologicals, 40150-MM08 (1/5000) and the secondary antibody used for detection was Goat anti-Mouse, JIR, 115-035-146 (1/10000). The primary antibody for detection of MERS CoV S protein was MERS-CoV spike protein S1 antibody (N-terminal) from Sino Biological, (100208-RP02, 1/5000). The secondary antibody used for detection was Goat anti-Mouse from JIR (115-035-144, 1/10000). The primary antibody used for detection was anti-coronavirus OC43 spike protein from Antibodies-online (ABIN2754654, 1/1000. The secondary antibody used for detection was Goat anti-Rabbit from JIR (111-035-144, 1/10000).

### Electron Microscopy

[0424] To determine whether expressed S protein assembled into VLPs, transmission electron microscopy (TEM) of immuno-trapped particles was performed on purified VLPs. Glow discharged carbon/copper grids (10 s, 0.3 mbar) were placed on 20 μL of purified VLPs (100 μg/mL) for 5 min and then washed 4 times with sterile distilled water. The grids were floated on 20 μL of 2% uranyl acetate for 1 min, excess solution is then removed by touching a moist filter paper and allowed to dry for 24 h on a filter paper before viewing under a TEM (Tecnai Microscope).

### Example 3: Sequences

[0425] The following sequences were use in the examples described above.

Native SARS-CoV-2 S protein wtTM/CT AA (P0DTC2)
(SEQ ID NO: 1)
MFVFLVLLPLVSSQCVNLTTRTQLPPAYTNSFTRGVYYPDKVFRSSVLHSTQDLFLPFFSNV
TWFHAIHVSGTNGTKRFDNPVLPFNDGVYFASTEKSNIIRGWIFGTTLDSKTQSLLIVNNAT
NVVIKVCEFQFCNDPFLGVYYHKNNKSWMESEFRVYSSANNCTFEYVSQPFLMDLEGKQGNF
KNLREFVFKNIDGYFKIYSKHTPINLVRDLPQGFSALEPLVDLPIGINITRFQTLLALHRSY
LTPGDSSSGWTAGAAAYYVGYLQPRTFLLKYNENGTITDAVDCALDPLSETKCTLKSFTVEK
GIYQTSNFRVQPTESIVRFPNITNLCPFGEVFNATRFASVYAWNRKRISNCVADYSVLYNSA
SFSTFKCYGVSPTKLNDLCFTNVYADSFVIRGDEVRQIAPGQTGKIADYNYKLPDDFTGCVI
AWNSNNLDSKVGGNYNYLYRLFRKSNLKPFERDISTEIYQAGSTPCNGVEGFNCYFPLQSYG
FQPTNGVGYQPYRVVVLSFELLHAPATVCGPKKSTNLVKNKCVNFNFNGLTGTGVLTESNKK
FLPFQQFGRDIADTTDAVRDPQTLEILDITPCSFGGVSVITPGTNTSNQVAVLYQDVNCTEV
PVAIHADQLTPTWRVYSTGSNVFQTRAGCLIGAEHVNNSYECDIPIGAGICASYQTQTNSPR
RARSVASQSIIAYTMSLGAENSVAYSNNSIAIPTNFTISVTTEILPVSMTKTSVDCTMYICG
DSTECSNLLLQYGSFCTQLNRALTGIAVEQDKNTQEVFAQVKQIYKTPPIKDFGGFNFSQIL
PDPSKPSKRSFIEDLLFNKVTLADAGFIKQYGDCLGDIAARDLICAQKFNGLTVLPPLLTDE
MIAQYTSALLAGTITSGWTFGAGAALQIPFAMQMAYRFNGIGVTQNVLYENQKLIANQFNSA
IGKIQDSLSSTASALGKLQDVVNQNAQALNTLVKQLSSNFGAISSVLNDILSRLDKVEAEVQ
IDRLITGRLQSLQTYVTQQLIRAAEIRASANLAATKMSECVLGQSKRVDFCGKGYHLMSFPQ
SAPHGVVFLHVTYVPAQEKNFTTAPAICHDGKAHFPREGVFVSNGTHWFVTQRNFYEPQIIT
TDNTFVSGNCDVVIGIVNNTVYDPLQPELDSFKEELDKYFKNHTSPDVDLGDISGINASVVN
IQKEIDRLNEVAKNLNESLIDLQELGKYEQYIKWPWYIWLGFIAGLIAIVMVTIMLCCMTSC
CSCLKGCCSCGSCCKFDEDDSEPVLKGVKLHYT
Native SARS-CoV-2 S protein wtTM/CT AA (P0DTC2) without signal peptide (SP)
(SEQ ID NO: 2)
VNLTTRTQLPPAYTNSFTRGVYYPDKVFRSSVLHSTQDLFLPFFSNVTWFHAIHVSGTNGTK
RFDNPVLPFNDGVYFASTEKSNIIRGWIFGTTLDSKTQSLLIVNNATNVVIKVCEFQFCNDP
FLGVYYHKNNKSWMESEFRVYSSANNCTFEYVSQPFLMDLEGKQGNFKNLREFVFKNIDGYF
KIYSKHTPINLVRDLPQGFSALEPLVDLPIGINITRFQTLLALHRSYLTPGDSSSGWTAGAA
AYYVGYLQPRTFLLKYNENGTITDAVDCALDPLSETKCTLKSFTVEKGIYQTSNFRVQPTES
IVRFPNITNLCPFGEVFNATRFASVYAWNRKRISNCVADYSVLYNSASFSTFKCYGVSPTKL
NDLCFTNVYADSFVIRGDEVRQIAPGQTGKIADYNYKLPDDFTGCVIAWNSNNLDSKVGGNY
NYLYRLFRKSNLKPFERDISTEIYQAGSTPCNGVEGFNCYFPLQSYGFQPTNGVGYQPYRVV
VLSFELLHAPATVCGPKKSTNLVKNKCVNFNFNGLTGTGVLTESNKKFLPFQQFGRDIADTT
DAVRDPQTLEILDITPCSFGGVSVITPGTNTSNQVAVLYQDVNCTEVPVAIHADQLTPTWRV
YSTGSNVFQTRAGCLIGAEHVNNSYECDIPIGAGICASYQTQTNSPRRARSVASQSIIAYTM
SLGAENSVAYSNNSIAIPTNFTISVTTEILPVSMTKTSVDCTMYICGDSTECSNLLLQYGSF
CTQLNRALTGIAVEQDKNTQEVFAQVKQIYKTPPIKDFGGFNFSQILPDPSKPSKRSFIEDL
LFNKVTLADAGFIKQYGDCLGDIAARDLICAQKFNGLTVLPPLLTDEMIAQYTSALLAGTIT
SGWTFGAGAALQIPFAMQMAYRFNGIGVTQNVLYENQKLIANQFNSAIGKIQDSLSSTASAL
GKLQDVVNQNAQALNTLVKQLSSNFGAISSVLNDILSRLDKVEAEVQIDRLITGRLQSLQTY
VTQQLIRAAEIRASANLAATKMSECVLGQSKRVDFCGKGYHLMSFPQSAPHGVVFLHVTYVP
AQEKNFTTAPAICHDGKAHFPREGVFVSNGTHWFVTQRNFYEPQIITTDNTFVSGNCDVVIG
IVNNTVYDPLQPELDSFKEELDKYFKNHTSPDVDLGDISGINASVVNIQKEIDRLNEVAKNL
NESLIDLQELGKYEQYIKWPWYIWLGFIAGLIAIVMVTIMLCCMTSCCSCLKGCCSCGSCCK
FDEDDSEPVLKGVKLHYT
H5 A/Indonesia/5/05 Hemagglutinin (HA) AA (A5A5L7)
(SEQ ID NO: 3)
MEKIVLLLAIVSLVKSDQICIGYHANNSTEQVDTIMEKNVTVTHAQDILEKTHNGKLCDLDG
VKPLILRDCSVAGWLLGNPMCDEFINVPEWSYIVEKANPTNDLCYPGSFNDYEELKHLLSRI
NHFEKIQIIPKSSWSDHEASSGVSSACPYLGSPSFFRNVVWLIKKNSTYPTIKKSYNNTNQE
DLLVLWGIHHPNDAAEQTRLYONPTTYISIGTSTLNQRLVPKIATRSKVNGQSGRMEFFWTI
LKPNDAINFESNGNFIAPEYAYKIVKKGDSAIMKSELEYGNCNTKCQTPMGAINSSMPFHNI
HPLTIGECPKYVKSNRLVLATGLRNSPQRESRRKKRGLFGAIAGFIEGGWQGMVDGWYGYHH
SNEQGSGYAADKESTQKAIDGVTNKVNSIIDKMNTQFEAVGREFNNLERRIENLNKKMEDGF
LDVWTYNAELLVLMENERTLDFHDSNVKNLYDKVRLQLRDNAKELGNGCFEFYHKCDNECME
SIRNGTYNYPQYSEEARLKREEISGVKLESIGTYQILSIYSTVASSLALAIMMAGLSLWMCS
NGSLQCRICI
H5 A/Indonesia/5/05 Hemagglutinin (HA) viral cDNA (EF541394.1)
(SEQ ID NO: 4)
CTGTAAAAATGGAGAAAATAGTGCTTCTTCTTGCAATAGTCAGTCTTGTTAAAAGTGATCAG
ATTTGCATTGGTTACCATGCAAACAATTCAACAGAGCAGGTTGACACAATCATGGAAAAGAA
CGTTACTGTTACACATGCCCAAGACATACTGGAAAAGACACACAACGGGAAGCTCTGCGATC
TAGATGGAGTGAAGCCTCTAATTTTAAGAGATTGTAGTGTAGCTGGATGGCTCCTCGGGAAC
CCAATGTGTGACGAATTCATCAATGTACCGGAATGGTCTTACATAGTGGAGAAGGCCAATCC
AACCAATGACCTCTGTTACCCAGGGAGTTTCAACGACTATGAAGAACTGAAACACCTATTGA
GCAGAATAAACCATTTTGAGAAAATTCAAATCATCCCCAAAAGTTCTTGGTCCGATCATGAA
GCCTCATCAGGAGTGAGCTCAGCATGTCCATACCTGGGAAGTCCCTCCTTTTTTAGAAATGT
GGTATGGCTTATCAAAAAGAACAGTACATACCCAACAATAAAGAAAAGCTACAATAATACCA
ACCAAGAAGATCTTTTGGTACTGTGGGGAATTCACCATCCTAATGATGCGGCAGAGCAGACA
AGGCTATATCAAAACCCAACCACCTATATTTCCATTGGGACATCAACACTAAACCAGAGATT
GGTACCAAAAATAGCTACTAGATCCAAAGTAAACGGGCAAAGTGGAAGGATGGAGTTCTTCT
GGACAATTTTAAAACCTAATGATGCAATCAACTTCGAGAGTAATGGAAATTTCATTGCTCCA
GAATATGCATACAAAATTGTCAAGAAAGGGGACTCAGCAATTATGAAAAGTGAATTGGAATA
TGGTAACTGCAACACCAAGTGTCAAACTCCAATGGGGGCGATAAACTCTAGTATGCCATTCC
ACAACATACACCCTCTCACCATCGGGGAATGCCCCAAATATGTGAAATCAAACAGATTAGTC
CTTGCAACAGGGCTCAGAAATAGCCCTCAAAGAGAGAGCAGAAGAAAAAAGAGAGGACTATT
TGGAGCTATAGCAGGTTTTATAGAGGGAGGATGGCAGGGAATGGTAGATGGTTGGTATGGGT
ACCACCATAGCAATGAGCAGGGGAGTGGGTACGCTGCAGACAAAGAATCCACTCAAAAGGCA
ATAGATGGAGTCACCAATAAGGTCAACTCAATCATTGACAAAATGAACACTCAGTTTGAGGC
CGTTGGAAGGGAATTTAATAACTTAGAAAGGAGAATAGAGAATTTAAACAAGAAGATGGAAG
ACGGGTTTCTAGATGTCTGGACTTATAATGCCGAACTTCTGGTTCTCATGGAAAATGAGAGA
ACTCTAGACTTTCATGACTCAAATGTTAAGAACCTCTACGACAAGGTCCGACTACAGCTTAG
GGATAATGCAAAGGAGCTGGGTAACGGTTGTTTCGAGTTCTATCACAAATGTGATAATGAAT
GTATGGAAAGTATAAGAAACGGAACGTACAACTATCCGCAGTATTCAGAAGAAGCAAGATTA
AAAAGAGAGGAAATAAGTGGGGTAAAATTGGAATCAATAGGAACTTACCAAATACTGTCAAT
TTATTCAACAGTGGCGAGTTCCCTAGCACTGGCAATCATGATGGCTGGTCTATCTTTATGGA
TGTGCTCCAATGGATCGTTACAATGCAGAATTTGCATTTAAATTTGTGAGTTCAG
Modified SARS-CoV-2 with H5 A/Indonesia/5/05 Hemagglutinin CT AA
(SEQ ID NO: 5)
MFVFLVLLPLVSSQCVNLTTRTQLPPAYTNSFTRGVYYPDKVFRSSVLHSTQDLFLPFFSNV
TWFHAIHVSGTNGTKRFDNPVLPFNDGVYFASTEKSNIIRGWIFGTTLDSKTQSLLIVNNAT
NVVIKVCEFQFCNDPFLGVYYHKNNKSWMESEFRVYSSANNCTFEYVSQPFLMDLEGKQGNF
KNLREFVFKNIDGYFKIYSKHTPINLVRDLPQGFSALEPLVDLPIGINITRFQTLLALHRSY
LTPGDSSSGWTAGAAAYYVGYLQPRTELLKYNENGTITDAVDCALDPLSETKCTLKSFTVEK
GIYQTSNFRVQPTESIVRFPNITNLCPFGEVFNATRFASVYAWNRKRISNCVADYSVLYNSA
SFSTFKCYGVSPTKLNDLCFTNVYADSFVIRGDEVRQIAPGQTGKIADYNYKLPDDFTGCVI
AWNSNNLDSKVGGNYNYLYRLFRKSNLKPFERDISTEIYQAGSTPCNGVEGFNCYFPLQSYG
FQPTNGVGYQPYRVVVLSFELLHAPATVCGPKKSTNLVKNKCVNFNFNGLTGTGVLTESNKK
FLPFQQFGRDIADTTDAVRDPQTLEILDITPCSFGGVSVITPGTNTSNQVAVLYQDVNCTEV
PVAIHADQLTPTWRVYSTGSNVFQTRAGCLIGAEHVNNSYECDIPIGAGICASYQTQTNSPR
RARSVASQSIIAYTMSLGAENSVAYSNNSIAIPTNFTISVTTEILPVSMTKTSVDCTMYICG
DSTECSNLLLQYGSFCTQLNRALTGIAVEQDKNTQEVFAQVKQIYKTPPIKDFGGFNFSQIL
PDPSKPSKRSFIEDLLFNKVTLADAGFIKQYGDCLGDIAARDLICAQKFNGLTVLPPLLTDE
MIAQYTSALLAGTITSGWTFGAGAALQIPFAMQMAYRFNGIGVTQNVLYENQKLIANQFNSA
IGKIQDSLSSTASALGKLQDVVNQNAQALNTLVKQLSSNFGAISSVLNDILSRLDKVEAEVQ
IDRLITGRLQSLQTYVTQQLIRAAEIRASANLAATKMSECVLGQSKRVDFCGKGYHLMSFPQ
SAPHGVVFLHVTYVPAQEKNFTTAPAICHDGKAHFPREGVFVSNGTHWFVTQRNFYEPQIIT
TDNTFVSGNCDVVIGIVNNTVYDPLQPELDSFKEELDKYFKNHTSPDVDLGDISGINASVVN
IQKEIDRLNEVAKNLNESLIDLQELGKYEQYIKWPWYIWLGFIAGLIAIVMVTIMLSLWMCS
NGSLQCRICI
H1 A/California/7/2009 Hemagglutinin TM/CT AA
(SEQ ID NO: 6)
IDGVKLESTRIYQILAIYSTVASSLVLVVSLGAISFWMCSNGSLQCRICI
H2 A/Singapore/1/1957 Hemagglutinin TM/CT AA
(SEQ ID NO: 7)
IKGVKLSSMGVYQILAIYATVAGSLSLAIMMAGISFWMCSNGSLQCRICI
H3 A/Minnesota/41/2019 Hemagglutinin TM/CT AA
(SEQ ID NO: 8)
IKGVELKSGYKDWILWISFAISCFLLCVALLGFIMWACQKGNIRCNICI
H5 A/Indonesia/5/05 Hemagglutinin TM/CT AA
(SEQ ID NO: 9)
ISGVKLESIGTYQILSIYSTVASSLALAIMMAGLSLWMCSNGSLQCRICI
H6 A/Teal/Hong Kong/W312/97 Hemagglutinin TM/CT AA
(SEQ ID NO: 10)
IESVKLENLGVYQILAIYSTVSSSLVLVGLIMAMGLWMCSNGSMQCRICI
H7 A/Guangdong/17SF003/2016 Hemagglutinin TM/CT AA
(SEQ ID NO: 11)
IDPVKLSSGYKDVILWFSFGASCFILLAIVMGLVFICVKNGNMRCTICI
H9 A/Hong Kong/1073/99 Hemagglutinin TM/CT AA
(SEQ ID NO: 12)
IEGVKLESEGTYKILTIYSTVASSLVLAMGFAAFLFWAMSNGSCRCNICI
B/Washington/02/2019 Hemagglutinin TM/CT AA
(SEQ ID NO: 13)
AASLNDDGLDNHTILLYYSTAASSLAVTLMIAIFVVYMVSRDNVSCSICL
Consensus Sequence of C-Terminal Region of Influenza Hemagglutinin
(SEQ ID NO: 14)
IXGVKLXSXGXYXILXIYSTVASSLXLXXXXXXXXXWMCSNGSXXCXICI
Consensus Sequence of CT Domain of Influenza Hemagglutinin
(SEQ ID NO: 15)
XXWMCSNGSXXCXICI
C-Terminal Region of Native SARS-CoV-2 S protein wtTM/CT
(SEQ ID NO: 16)
WYEQYIKWPWYIWLGFIAGLIAIVMVTIMLCCMTSCCSCLKGCCSCGSCCKFDEDDSEPVLK
GVKLHYT
C-Terminal Region of H5 A/Indonesia/5/05 Hemagglutinin
(SEQ ID NO: 17)
ISGVKLESIGTYQILSIYSTVASSLALAIMMAGLSLWMCSNGSLQCRICI
C-Terminal Region of Modified SARS-CoV-2 S protein with H5i Hemagglutinin CT
(SEQ ID NO: 18)
WYIWLGFIAGLIAIVMVTIMLSLWMCSNGSLQCRICI
C-Terminal Region of Modified SARS-CoV-2 S protein with H5i Hemagglutinin CT,
Variation 1
(SEQ ID NO: 19)
WYIWLGFIAGLIAIVMVTIMMAGLSLWMCSNGSLQCRICI
(no SP) SARS-CoV-2 S protein GSAS + PP wtTM/CT AA
(SEQ ID NO: 20)
VNLTTRTQLPPAYTNSFTRGVYYPDKVFRSSVLHSTQDLFLPFFSNVTWFHAIHVSGTNGTK
RFDNPVLPFNDGVYFASTEKSNIIRGWIFGTTLDSKTQSLLIVNNATNVVIKVCEFQFCNDP
FLGVYYHKNNKSWMESEFRVYSSANNCTFEYVSQPFLMDLEGKQGNFKNLREFVFKNIDGYF
KIYSKHTPINLVRDLPQGFSALEPLVDLPIGINITRFQTLLALHRSYLTPGDSSSGWTAGAA
AYYVGYLQPRTFLLKYNENGTITDAVDCALDPLSETKCTLKSFTVEKGIYQTSNFRVQPTES
IVRFPNITNLCPFGEVFNATRFASVYAWNRKRISNCVADYSVLYNSASFSTFKCYGVSPTKL
NDLCFTNVYADSFVIRGDEVRQIAPGQTGKIADYNYKLPDDFTGCVIAWNSNNLDSKVGGNY
NYLYRLFRKSNLKPFERDISTEIYQAGSTPCNGVEGFNCYFPLQSYGFQPTNGVGYQPYRVV
VLSFELLHAPATVCGPKKSTNLVKNKCVNFNFNGLTGTGVLTESNKKFLPFQQFGRDIADTT
DAVRDPQTLEILDITPCSFGGVSVITPGTNTSNQVAVLYQDVNCTEVPVAIHADQLTPTWRV
YSTGSNVFQTRAGCLIGAEHVNNSYECDIPIGAGICASYQTQTNSPGSASSVASQSIIAYTM
SLGAENSVAYSNNSIAIPTNFTISVTTEILPVSMTKTSVDCTMYICGDSTECSNLLLQYGSF
CTQLNRALTGIAVEQDKNTQEVFAQVKQIYKTPPIKDFGGFNFSQILPDPSKPSKRSFIEDL
LFNKVTLADAGFIKQYGDCLGDIAARDLICAQKFNGLTVLPPLLTDEMIAQYTSALLAGTIT
SGWTFGAGAALQIPFAMQMAYRFNGIGVTQNVLYENQKLIANQFNSAIGKIQDSLSSTASAL
GKLQDVVNQNAQALNTLVKQLSSNFGAISSVLNDILSRLDPPEAEVQIDRLITGRLQSLQTY
VTQQLIRAAEIRASANLAATKMSECVLGQSKRVDFCGKGYHLMSFPQSAPHGVVFLHVTYVP
AQEKNFTTAPAICHDGKAHFPREGVFVSNGTHWFVTQRNFYEPQIITTDNTFVSGNCDVVIG
IVNNTVYDPLQPELDSFKEELDKYFKNHTSPDVDLGDISGINASVVNIQKEIDRLNEVAKNL
NESLIDLQELGKYEQYIKWPWYIWLGFIAGLIAIVMVTIMLCCMTSCCSCLKGCCSCGSCCK
FDEDDSEPVLKGVKLHYT
(no SP) Modified SARS-CoV-2 S protein GSAS + PP with H5i Hemagglutinin CT AA
(SEQ ID NO: 21)
VNLTTRTQLPPAYTNSFTRGVYYPDKVFRSSVLHSTQDLFLPFFSNVTWFHAIHVSGTNGTK
RFDNPVLPFNDGVYFASTEKSNIIRGWIFGTTLDSKTQSLLIVNNATNVVIKVCEFQFCNDP
FLGVYYHKNNKSWMESEFRVYSSANNCTFEYVSQPFLMDLEGKQGNFKNLREFVFKNIDGYF
KIYSKHTPINLVRDLPQGFSALEPLVDLPIGINITRFQTLLALHRSYLTPGDSSSGWTAGAA
AYYVGYLQPRTFLLKYNENGTITDAVDCALDPLSETKCTLKSFTVEKGIYQTSNFRVQPTES
IVRFPNITNLCPFGEVFNATRFASVYAWNRKRISNCVADYSVLYNSASFSTFKCYGVSPTKL
NDLCFTNVYADSFVIRGDEVRQIAPGQTGKIADYNYKLPDDFTGCVIAWNSNNLDSKVGGNY
NYLYRLFRKSNLKPFERDISTEIYQAGSTPCNGVEGFNCYFPLQSYGFQPTNGVGYQPYRVV
VLSFELLHAPATVCGPKKSTNLVKNKCVNFNFNGLTGTGVLTESNKKFLPFQQFGRDIADTT
DAVRDPQTLEILDITPCSFGGVSVITPGTNTSNQVAVLYQDVNCTEVPVAIHADQLTPTWRV
YSTGSNVFQTRAGCLIGAEHVNNSYECDIPIGAGICASYQTQTNSPGSASSVASQSIIAYTM
SLGAENSVAYSNNSIAIPTNFTISVTTEILPVSMTKTSVDCTMYICGDSTECSNLLLQYGSF
CTQLNRALTGIAVEQDKNTQEVFAQVKQIYKTPPIKDFGGFNFSQILPDPSKPSKRSFIEDL
LFNKVTLADAGFIKQYGDCLGDIAARDLICAQKFNGLTVLPPLLTDEMIAQYTSALLAGTIT
SGWTFGAGAALQIPFAMQMAYRFNGIGVTQNVLYENQKLIANQFNSAIGKIQDSLSSTASAL
GKLQDVVNQNAQALNTLVKQLSSNFGAISSVLNDILSRLDPPEAEVQIDRLITGRLQSLQTY
VTQQLIRAAEIRASANLAATKMSECVLGQSKRVDFCGKGYHLMSFPQSAPHGVVFLHVTYVP
AQEKNFTTAPAICHDGKAHFPREGVFVSNGTHWFVTQRNFYEPQIITTDNTFVSGNCDVVIG
IVNNTVYDPLQPELDSFKEELDKYFKNHTSPDVDLGDISGINASVVNIQKEIDRLNEVAKNL
NESLIDLQELGKYEQYIKWPWYIWLGFIAGLIAIVMVTIMLSLWMCSNGSLQCRICI
PDI-SARS-CoV-2 S protein GSAS + PP wtTM/CT-DNA
(SEQ ID NO: 22)
ATGGCGAAAAACGTTGCGATTTTCGGCTTATTGTTTTCTCTTCTTGTGTTGGTTCCTTCTCA
GATCTTCGCGGTGAATCTTACGACGCGAACACAGTTACCACCCGCATATACAAATAGCTTCA
CTCGGGGTGTTTATTACCCCGACAAAGTGTTCAGGTCCTCCGTGCTCCACTCAACACAGGAC
CTCTTTCTTCCTTTCTTTTCTAACGTGACATGGTTTCATGCCATTCATGTATCCGGCACTAA
CGGTACTAAGAGGTTCGATAATCCTGTGCTCCCTTTCAATGACGGCGTTTACTTTGCAAGCA
CAGAGAAGAGTAACATCATCCGAGGTTGGATCTTTGGCACTACCCTCGATTCAAAGACGCAG
AGCCTCCTCATTGTGAACAATGCCACTAACGTGGTGATCAAAGTTTGCGAGTTTCAGTTCTG
CAATGACCCTTTCTTGGGGGTGTACTATCATAAGAACAACAAGTCTTGGATGGAATCTGAAT
TCCGCGTCTATAGCAGCGCCAACAACTGCACCTTTGAATACGTGTCCCAGCCCTTCCTTATG
GACCTGGAGGGAAAGCAGGGAAACTTTAAGAATCTGAGAGAGTTCGTGTTTAAAAATATCGA
CGGCTATTTTAAGATCTATTCTAAGCACACGCCTATTAATCTCGTGCGCGATCTTCCACAAG
GCTTCAGCGCCCTGGAACCACTCGTGGACCTCCCAATTGGTATCAACATCACTAGATTTCAG
ACTCTGCTTGCCCTCCACCGATCCTATCTGACACCCGGAGACTCCTCTAGCGGCTGGACTGC
CGGCGCTGCCGCTTATTACGTTGGTTATCTTCAGCCACGCACGTTCCTGCTGAAGTATAACG
AGAATGGTACTATTACCGATGCCGTGGATTGTGCCCTTGACCCCCTGTCCGAAACTAAGTGC
ACACTCAAGTCATTCACTGTGGAAAAAGGAATCTACCAGACAAGCAATTTTCGGGTCCAGCC
TACTGAGAGCATTGTGCGCTTTCCTAACATCACAAATCTTTGCCCCTTCGGAGAGGTTTTCA
ATGCTACACGGTTTGCCTCCGTGTATGCCTGGAACCGCAAGAGAATTTCCAATTGCGTGGCC
GATTACTCCGTGCTCTACAATAGTGCAAGCTTTAGCACCTTTAAGTGCTATGGCGTATCCCC
TACTAAGCTTAACGACTTGTGTTTCACAAACGTGTATGCCGACTCCTTTGTGATACGGGGCG
ACGAAGTTAGACAGATAGCACCAGGACAGACGGGAAAGATAGCTGACTACAACTATAAGCTT
CCTGATGACTTCACTGGCTGCGTTATCGCGTGGAATTCTAACAACCTGGACTCAAAAGTCGG
CGGCAACTATAACTATCTCTATCGGCTGTTCCGCAAGAGTAACCTTAAGCCCTTTGAGAGAG
ATATAAGCACTGAAATCTACCAGGCTGGCAGTACGCCCTGTAATGGCGTGGAAGGCTTTAAT
TGTTATTTTCCACTGCAATCCTATGGTTTTCAGCCAACCAATGGCGTGGGCTACCAACCATA
CCGCGTCGTGGTGCTCTCCTTTGAACTGCTCCACGCTCCCGCGACTGTCTGCGGCCCCAAGA
AGTCCACGAACCTTGTGAAGAATAAGTGCGTTAATTTTAATTTCAACGGCCTCACTGGAACA
GGAGTGCTCACTGAGAGTAACAAGAAGTTCCTGCCATTTCAACAATTTGGCAGAGACATAGC
CGATACTACTGACGCCGTTAGGGACCCCCAGACCCTCGAGATTCTCGATATAACGCCCTGCT
CCTTCGGTGGAGTTTCCGTGATCACGCCAGGCACCAATACCAGTAACCAGGTCGCCGTGCTG
TATCAGGATGTCAACTGTACTGAGGTGCCCGTAGCCATCCATGCGGATCAGCTCACACCAAC
TTGGAGGGTGTACAGCACCGGCTCCAATGTATTCCAGACTCGGGCCGGATGCCTTATTGGCG
CCGAACACGTGAACAATAGTTACGAATGCGATATTCCAATTGGCGCCGGAATCTGTGCTAGC
TACCAGACTCAGACGAACTCCCCAGGCAGCGCCAGCAGCGTTGCCAGCCAGTCAATCATCGC
TTATACAATGTCACTTGGAGCCGAAAACTCCGTGGCTTACTCAAACAACAGCATCGCCATCC
CCACAAACTTCACCATATCCGTGACAACTGAGATTCTGCCAGTGTCCATGACTAAGACGTCC
GTAGATTGCACTATGTACATATGCGGCGACAGCACAGAATGTTCTAATCTGCTGCTGCAATA
TGGAAGCTTCTGCACTCAACTGAACAGAGCGCTCACAGGCATCGCCGTGGAGCAGGATAAGA
ATACCCAGGAGGTGTTCGCCCAAGTTAAGCAGATCTACAAGACCCCACCCATAAAGGATTTC
GGTGGATTCAATTTTAGTCAGATACTCCCAGACCCATCTAAGCCATCCAAGAGGAGCTTTAT
CGAGGATCTTTTGTTTAACAAAGTTACTCTGGCCGACGCCGGTTTCATCAAGCAGTACGGAG
ATTGCCTCGGCGACATCGCTGCTCGTGACCTCATCTGTGCGCAAAAGTTTAACGGTCTGACG
GTGCTGCCTCCCCTCCTTACTGATGAAATGATCGCCCAGTATACCAGCGCACTCCTCGCTGG
CACCATAACATCCGGTTGGACATTCGGCGCTGGTGCAGCACTGCAGATACCATTCGCCATGC
AAATGGCATATCGTTTCAACGGTATCGGTGTCACACAGAATGTCCTATATGAGAACCAGAAG
CTGATCGCAAATCAGTTCAATAGTGCCATCGGAAAAATCCAGGATAGCCTTAGCAGCACAGC
CTCAGCCCTTGGCAAACTCCAGGATGTCGTGAACCAGAATGCCCAGGCTCTCAATACCCTCG
TGAAGCAGCTCTCATCTAATTTCGGCGCAATTTCCAGTGTCCTCAACGACATCCTCAGCCGC
CTCGACCCCCCCGAGGCCGAAGTGCAGATTGACAGACTGATTACAGGTCGACTCCAGAGCCT
CCAGACTTACGTGACTCAGCAGCTGATAAGAGCCGCCGAGATAAGGGCCAGCGCTAACCTGG
CTGCCACAAAGATGTCTGAGTGCGTGCTGGGCCAGTCCAAGAGAGTAGACTTCTGTGGCAAA
GGCTACCATCTGATGAGCTTCCCACAATCCGCACCTCACGGCGTAGTGTTCCTCCACGTGAC
ATATGTACCGGCTCAGGAGAAGAATTTCACTACCGCTCCTGCTATATGCCATGATGGAAAGG
CTCACTTCCCCCGGGAGGGGGTGTTCGTGTCCAACGGCACCCATTGGTTTGTGACTCAGCGG
AATTTCTACGAACCCCAGATCATAACCACTGACAACACATTTGTGTCCGGAAATTGTGACGT
GGTCATTGGAATAGTGAACAACACTGTTTATGATCCACTGCAGCCAGAACTTGACAGCTTTA
AGGAGGAGCTCGACAAGTACTTCAAGAATCATACGTCACCAGATGTGGACCTCGGAGATATT
AGCGGTATCAATGCCAGTGTTGTCAATATTCAGAAGGAAATAGACCGCCTTAATGAGGTCGC
CAAAAATCTGAACGAGAGCCTCATCGATCTTCAGGAGCTGGGCAAATATGAGCAGTACATCA
AGTGGCCTTGGTATATTTGGCTTGGCTTCATCGCCGGCCTGATCGCCATAGTAATGGTCACA
ATTATGCTCTGCTGCATGACCTCTTGCTGCTCCTGTCTGAAAGGCTGCTGCTCTTGCGGATC
CTGCTGCAAATTTGATGAGGATGACAGTGAACCAGTCCTGAAGGGCGTGAAGCTGCACTATA
CTTAG
PDI-SARS-CoV-2 S protein GSAS + PP wtTM/CT-AA
(SEQ ID NO: 23)
MAKNVAIFGLLFSLLVLVPSQIFAVNLTTRTQLPPAYTNSFTRGVYYPDKVFRSSVLHSTQD
LFLPFFSNVTWFHAIHVSGTNGTKRFDNPVLPFNDGVYFASTEKSNIIRGWIFGTTLDSKTQ
SLLIVNNATNVVIKVCEFQFCNDPFLGVYYHKNNKSWMESEFRVYSSANNCTFEYVSQPFLM
DLEGKQGNFKNLREFVFKNIDGYFKIYSKHTPINLVRDLPQGFSALEPLVDLPIGINITRFQ
TLLALHRSYLTPGDSSSGWTAGAAAYYVGYLQPRTFLLKYNENGTITDAVDCALDPLSETKC
TLKSFTVEKGIYQTSNFRVQPTESIVRFPNITNLCPFGEVFNATRFASVYAWNRKRISNCVA
DYSVLYNSASFSTFKCYGVSPTKLNDLCFTNVYADSFVIRGDEVRQIAPGQTGKIADYNYKL
PDDFTGCVIAWNSNNLDSKVGGNYNYLYRLFRKSNLKPFERDISTEIYQAGSTPCNGVEGFN
CYFPLQSYGFQPTNGVGYQPYRVVVLSFELLHAPATVCGPKKSTNLVKNKCVNFNFNGLTGT
GVLTESNKKFLPFQQFGRDIADTTDAVRDPQTLEILDITPCSFGGVSVITPGTNTSNQVAVL
YQDVNCTEVPVAIHADQLTPTWRVYSTGSNVFQTRAGCLIGAEHVNNSYECDIPIGAGICAS
YQTQTNSPGSASSVASQSIIAYTMSLGAENSVAYSNNSIAIPTNFTISVTTEILPVSMTKTS
VDCTMYICGDSTECSNLLLQYGSFCTQLNRALTGIAVEQDKNTQEVFAQVKQIYKTPPIKDF
GGFNFSQILPDPSKPSKRSFIEDLLFNKVTLADAGFIKQYGDCLGDIAARDLICAQKFNGLT
VLPPLLTDEMIAQYTSALLAGTITSGWTFGAGAALQIPFAMQMAYRFNGIGVTQNVLYENQK
LIANQFNSAIGKIQDSLSSTASALGKLQDVVNQNAQALNTLVKQLSSNFGAISSVLNDILSR
LDPPEAEVQIDRLITGRLQSLQTYVTQQLIRAAEIRASANLAATKMSECVLGQSKRVDFCGK
GYHLMSFPQSAPHGVVFLHVTYVPAQEKNFTTAPAICHDGKAHFPREGVFVSNGTHWFVTQR
NFYEPQIITTDNTFVSGNCDVVIGIVNNTVYDPLQPELDSFKEELDKYFKNHTSPDVDLGDI
SGINASVVNIQKEIDRLNEVAKNLNESLIDLQELGKYEQYIKWPWYIWLGFIAGLIAIVMVT
IMLCCMTSCCSCLKGCCSCGSCCKFDEDDSEPVLKGVKLHYT
IF(PDI)-CoV(opt2).c
(SEQ ID NO: 24)
TCTCAGATCTTCGCGGTGAATCTTACGACGCGAACACAGTTACCACCCGCAT
IF(AVB)-CoV(opt2).r
(SEQ ID NO: 25)
ACGACACGACTAAGGCCTCTAAGTATAGTGCAGCTTCACGCCCTTCAGGAC
PDI-Modified SARS-CoV-2 S protein GSAS + PP H5iTM/CT-DNA
(SEQ ID NO: 26)
ATGGCGAAAAACGTTGCGATTTTCGGCTTATTGTTTTCTCTTCTTGTGTTGGTTCCTTCTCA
GATCTTCGCGGTGAATCTTACGACGCGAACACAGTTACCACCCGCATATACAAATAGCTTCA
CTCGGGGTGTTTATTACCCCGACAAAGTGTTCAGGTCCTCCGTGCTCCACTCAACACAGGAC
CTCTTTCTTCCTTTCTTTTCTAACGTGACATGGTTTCATGCCATTCATGTATCCGGCACTAA
CGGTACTAAGAGGTTCGATAATCCTGTGCTCCCTTTCAATGACGGCGTTTACTTTGCAAGCA
CAGAGAAGAGTAACATCATCCGAGGTTGGATCTTTGGCACTACCCTCGATTCAAAGACGCAG
AGCCTCCTCATTGTGAACAATGCCACTAACGTGGTGATCAAAGTTTGCGAGTTTCAGTTCTG
CAATGACCCTTTCTTGGGGGTGTACTATCATAAGAACAACAAGTCTTGGATGGAATCTGAAT
TCCGCGTCTATAGCAGCGCCAACAACTGCACCTTTGAATACGTGTCCCAGCCCTTCCTTATG
GACCTGGAGGGAAAGCAGGGAAACTTTAAGAATCTGAGAGAGTTCGTGTTTAAAAATATCGA
CGGCTATTTTAAGATCTATTCTAAGCACACGCCTATTAATCTCGTGCGCGATCTTCCACAAG
GCTTCAGCGCCCTGGAACCACTCGTGGACCTCCCAATTGGTATCAACATCACTAGATTTCAG
ACTCTGCTTGCCCTCCACCGATCCTATCTGACACCCGGAGACTCCTCTAGCGGCTGGACTGC
CGGCGCTGCCGCTTATTACGTTGGTTATCTTCAGCCACGCACGTTCCTGCTGAAGTATAACG
AGAATGGTACTATTACCGATGCCGTGGATTGTGCCCTTGACCCCCTGTCCGAAACTAAGTGC
ACACTCAAGTCATTCACTGTGGAAAAAGGAATCTACCAGACAAGCAATTTTCGGGTCCAGCC
TACTGAGAGCATTGTGCGCTTTCCTAACATCACAAATCTTTGCCCCTTCGGAGAGGTTTTCA
ATGCTACACGGTTTGCCTCCGTGTATGCCTGGAACCGCAAGAGAATTTCCAATTGCGTGGCC
GATTACTCCGTGCTCTACAATAGTGCAAGCTTTAGCACCTTTAAGTGCTATGGCGTATCCCC
TACTAAGCTTAACGACTTGTGTTTCACAAACGTGTATGCCGACTCCTTTGTGATACGGGGCG
ACGAAGTTAGACAGATAGCACCAGGACAGACGGGAAAGATAGCTGACTACAACTATAAGCTT
CCTGATGACTTCACTGGCTGCGTTATCGCGTGGAATTCTAACAACCTGGACTCAAAAGTCGG
CGGCAACTATAACTATCTCTATCGGCTGTTCCGCAAGAGTAACCTTAAGCCCTTTGAGAGAG
ATATAAGCACTGAAATCTACCAGGCTGGCAGTACGCCCTGTAATGGCGTGGAAGGCTTTAAT
TGTTATTTTCCACTGCAATCCTATGGTTTTCAGCCAACCAATGGCGTGGGCTACCAACCATA
CCGCGTCGTGGTGCTCTCCTTTGAACTGCTCCACGCTCCCGCGACTGTCTGCGGCCCCAAGA
AGTCCACGAACCTTGTGAAGAATAAGTGCGTTAATTTTAATTTCAACGGCCTCACTGGAACA
GGAGTGCTCACTGAGAGTAACAAGAAGTTCCTGCCATTTCAACAATTTGGCAGAGACATAGC
CGATACTACTGACGCCGTTAGGGACCCCCAGACCCTCGAGATTCTCGATATAACGCCCTGCT
CCTTCGGTGGAGTTTCCGTGATCACGCCAGGCACCAATACCAGTAACCAGGTCGCCGTGCTG
TATCAGGATGTCAACTGTACTGAGGTGCCCGTAGCCATCCATGCGGATCAGCTCACACCAAC
TTGGAGGGTGTACAGCACCGGCTCCAATGTATTCCAGACTCGGGCCGGATGCCTTATTGGCG
CCGAACACGTGAACAATAGTTACGAATGCGATATTCCAATTGGCGCCGGAATCTGTGCTAGC
TACCAGACTCAGACGAACTCCCCAGGCAGCGCCAGCAGCGTTGCCAGCCAGTCAATCATCGC
TTATACAATGTCACTTGGAGCCGAAAACTCCGTGGCTTACTCAAACAACAGCATCGCCATCC
CCACAAACTTCACCATATCCGTGACAACTGAGATTCTGCCAGTGTCCATGACTAAGACGTCC
GTAGATTGCACTATGTACATATGCGGCGACAGCACAGAATGTTCTAATCTGCTGCTGCAATA
TGGAAGCTTCTGCACTCAACTGAACAGAGCGCTCACAGGCATCGCCGTGGAGCAGGATAAGA
ATACCCAGGAGGTGTTCGCCCAAGTTAAGCAGATCTACAAGACCCCACCCATAAAGGATTTC
GGTGGATTCAATTTTAGTCAGATACTCCCAGACCCATCTAAGCCATCCAAGAGGAGCTTTAT
CGAGGATCTTTTGTTTAACAAAGTTACTCTGGCCGACGCCGGTTTCATCAAGCAGTACGGAG
ATTGCCTCGGCGACATCGCTGCTCGTGACCTCATCTGTGCGCAAAAGTTTAACGGTCTGACG
GTGCTGCCTCCCCTCCTTACTGATGAAATGATCGCCCAGTATACCAGCGCACTCCTCGCTGG
CACCATAACATCCGGTTGGACATTCGGCGCTGGTGCAGCACTGCAGATACCATTCGCCATGC
AAATGGCATATCGTTTCAACGGTATCGGTGTCACACAGAATGTCCTATATGAGAACCAGAAG
CTGATCGCAAATCAGTTCAATAGTGCCATCGGAAAAATCCAGGATAGCCTTAGCAGCACAGC
CTCAGCCCTTGGCAAACTCCAGGATGTCGTGAACCAGAATGCCCAGGCTCTCAATACCCTCG
TGAAGCAGCTCTCATCTAATTTCGGCGCAATTTCCAGTGTCCTCAACGACATCCTCAGCCGC
CTCGACCCCCCCGAGGCCGAAGTGCAGATTGACAGACTGATTACAGGTCGACTCCAGAGCCT
CCAGACTTACGTGACTCAGCAGCTGATAAGAGCCGCCGAGATAAGGGCCAGCGCTAACCTGG
CTGCCACAAAGATGTCTGAGTGCGTGCTGGGCCAGTCCAAGAGAGTAGACTTCTGTGGCAAA
GGCTACCATCTGATGAGCTTCCCACAATCCGCACCTCACGGCGTAGTGTTCCTCCACGTGAC
ATATGTACCGGCTCAGGAGAAGAATTTCACTACCGCTCCTGCTATATGCCATGATGGAAAGG
CTCACTTCCCCCGGGAGGGGGTGTTCGTGTCCAACGGCACCCATTGGTTTGTGACTCAGCGG
AATTTCTACGAACCCCAGATCATAACCACTGACAACACATTTGTGTCCGGAAATTGTGACGT
GGTCATTGGAATAGTGAACAACACTGTTTATGATCCACTGCAGCCAGAACTTGACAGCTTTA
AGGAGGAGCTCGACAAGTACTTCAAGAATCATACGTCACCAGATGTGGACCTCGGAGATATT
AGCGGTATCAATGCCAGTGTTGTCAATATTCAGAAGGAAATAGACCGCCTTAATGAGGTCGC
CAAAAATCTGAACGAGAGCCTCATCGATCTTCAGGAGCTGGGCAAATATGAGCAGTACATCA
AGTGGCCTTGGTATCAAATACTGTCAATTTATTCAACAGTGGCGAGTTCCCTAGCACTGGCA
ATCATGATGGCTGGTCTATCTTTATGGATGTGCTCCAATGGATCGTTACAATGCAGAATTTG
CATTTAA
PDI-Modified SARS-CoV-2 S protein GSAS + PP H5iTM/CT-AA
(SEQ ID NO: 27)
MAKNVAIFGLLFSLLVLVPSQIFAVNLTTRTQLPPAYTNSFTRGVYYPDKVFRSSVLHSTQD
LFLPFFSNVTWFHAIHVSGTNGTKRFDNPVLPFNDGVYFASTEKSNIIRGWIFGTTLDSKTQ
SLLIVNNATNVVIKVCEFQFCNDPFLGVYYHKNNKSWMESEFRVYSSANNCTFEYVSQPFLM
DLEGKQGNFKNLREFVFKNIDGYFKIYSKHTPINLVRDLPQGFSALEPLVDLPIGINITRFQ
TLLALHRSYLTPGDSSSGWTAGAAAYYVGYLQPRTFLLKYNENGTITDAVDCALDPLSETKC
TLKSFTVEKGIYQTSNFRVQPTESIVRFPNITNLCPFGEVFNATRFASVYAWNRKRISNCVA
DYSVLYNSASFSTFKCYGVSPTKLNDLCFTNVYADSFVIRGDEVRQIAPGQTGKIADYNYKL
PDDFTGCVIAWNSNNLDSKVGGNYNYLYRLFRKSNLKPFERDISTEIYQAGSTPCNGVEGFN
CYFPLQSYGFQPTNGVGYQPYRVVVLSFELLHAPATVCGPKKSTNLVKNKCVNFNFNGLTGT
GVLTESNKKFLPFQQFGRDIADTTDAVRDPQTLEILDITPCSFGGVSVITPGTNTSNQVAVL
YQDVNCTEVPVAIHADQLTPTWRVYSTGSNVFQTRAGCLIGAEHVNNSYECDIPIGAGICAS
YQTQTNSPGSASSVASQSIIAYTMSLGAENSVAYSNNSIAIPTNFTISVTTEILPVSMTKTS
VDCTMYICGDSTECSNLLLQYGSFCTQLNRALTGIAVEQDKNTQEVFAQVKQIYKTPPIKDF
GGFNFSQILPDPSKPSKRSFIEDLLFNKVTLADAGFIKQYGDCLGDIAARDLICAQKFNGLT
VLPPLLTDEMIAQYTSALLAGTITSGWTFGAGAALQIPFAMQMAYRFNGIGVTQNVLYENQK
LIANQFNSAIGKIQDSLSSTASALGKLQDVVNQNAQALNTLVKQLSSNFGAISSVLNDILSR
LDPPEAEVQIDRLITGRLQSLQTYVTQQLIRAAEIRASANLAATKMSECVLGQSKRVDFCGK
GYHLMSFPQSAPHGVVFLHVTYVPAQEKNFTTAPAICHDGKAHFPREGVFVSNGTHWFVTQR
NFYEPQIITTDNTFVSGNCDVVIGIVNNTVYDPLQPELDSFKEELDKYFKNHTSPDVDLGDI
SGINASVVNIQKEIDRLNEVAKNLNESLIDLQELGKYEQYIKWPWYQILSIYSTVASSLALA
IMMAGLSLWMCSNGSLQCRICI
IF(Avb)-H5I.r
(SEQ ID NO: 28)
ACGACACGACTAAGGCCTTTAAATGCAAATTCTGCATTGTAACGATCC
PDI-Modified SARS-CoV-2 S protein GSAS + PP wtTM/H5iCT-DNA
(SEQ ID NO: 29)
ATGGCGAAAAACGTTGCGATTTTCGGCTTATTGTTTTCTCTTCTTGTGTTGGTTCCTTCTCA
GATCTTCGCGGTGAATCTTACGACGCGAACACAGTTACCACCCGCATATACAAATAGCTTCA
CTCGGGGTGTTTATTACCCCGACAAAGTGTTCAGGTCCTCCGTGCTCCACTCAACACAGGAC
CTCTTTCTTCCTTTCTTTTCTAACGTGACATGGTTTCATGCCATTCATGTATCCGGCACTAA
CGGTACTAAGAGGTTCGATAATCCTGTGCTCCCTTTCAATGACGGCGTTTACTTTGCAAGCA
CAGAGAAGAGTAACATCATCCGAGGTTGGATCTTTGGCACTACCCTCGATTCAAAGACGCAG
AGCCTCCTCATTGTGAACAATGCCACTAACGTGGTGATCAAAGTTTGCGAGTTTCAGTTCTG
CAATGACCCTTTCTTGGGGGTGTACTATCATAAGAACAACAAGTCTTGGATGGAATCTGAAT
TCCGCGTCTATAGCAGCGCCAACAACTGCACCTTTGAATACGTGTCCCAGCCCTTCCTTATG
GACCTGGAGGGAAAGCAGGGAAACTTTAAGAATCTGAGAGAGTTCGTGTTTAAAAATATCGA
CGGCTATTTTAAGATCTATTCTAAGCACACGCCTATTAATCTCGTGCGCGATCTTCCACAAG
GCTTCAGCGCCCTGGAACCACTCGTGGACCTCCCAATTGGTATCAACATCACTAGATTTCAG
ACTCTGCTTGCCCTCCACCGATCCTATCTGACACCCGGAGACTCCTCTAGCGGCTGGACTGC
CGGCGCTGCCGCTTATTACGTTGGTTATCTTCAGCCACGCACGTTCCTGCTGAAGTATAACG
AGAATGGTACTATTACCGATGCCGTGGATTGTGCCCTTGACCCCCTGTCCGAAACTAAGTGC
ACACTCAAGTCATTCACTGTGGAAAAAGGAATCTACCAGACAAGCAATTTTCGGGTCCAGCC
TACTGAGAGCATTGTGCGCTTTCCTAACATCACAAATCTTTGCCCCTTCGGAGAGGTTTTCA
ATGCTACACGGTTTGCCTCCGTGTATGCCTGGAACCGCAAGAGAATTTCCAATTGCGTGGCC
GATTACTCCGTGCTCTACAATAGTGCAAGCTTTAGCACCTTTAAGTGCTATGGCGTATCCCC
TACTAAGCTTAACGACTTGTGTTTCACAAACGTGTATGCCGACTCCTTTGTGATACGGGGCG
ACGAAGTTAGACAGATAGCACCAGGACAGACGGGAAAGATAGCTGACTACAACTATAAGCTT
CCTGATGACTTCACTGGCTGCGTTATCGCGTGGAATTCTAACAACCTGGACTCAAAAGTCGG
CGGCAACTATAACTATCTCTATCGGCTGTTCCGCAAGAGTAACCTTAAGCCCTTTGAGAGAG
ATATAAGCACTGAAATCTACCAGGCTGGCAGTACGCCCTGTAATGGCGTGGAAGGCTTTAAT
TGTTATTTTCCACTGCAATCCTATGGTTTTCAGCCAACCAATGGCGTGGGCTACCAACCATA
CCGCGTCGTGGTGCTCTCCTTTGAACTGCTCCACGCTCCCGCGACTGTCTGCGGCCCCAAGA
AGTCCACGAACCTTGTGAAGAATAAGTGCGTTAATTTTAATTTCAACGGCCTCACTGGAACA
GGAGTGCTCACTGAGAGTAACAAGAAGTTCCTGCCATTTCAACAATTTGGCAGAGACATAGC
CGATACTACTGACGCCGTTAGGGACCCCCAGACCCTCGAGATTCTCGATATAACGCCCTGCT
CCTTCGGTGGAGTTTCCGTGATCACGCCAGGCACCAATACCAGTAACCAGGTCGCCGTGCTG
TATCAGGATGTCAACTGTACTGAGGTGCCCGTAGCCATCCATGCGGATCAGCTCACACCAAC
TTGGAGGGTGTACAGCACCGGCTCCAATGTATTCCAGACTCGGGCCGGATGCCTTATTGGCG
CCGAACACGTGAACAATAGTTACGAATGCGATATTCCAATTGGCGCCGGAATCTGTGCTAGC
TACCAGACTCAGACGAACTCCCCAGGCAGCGCCAGCAGCGTTGCCAGCCAGTCAATCATCGC
TTATACAATGTCACTTGGAGCCGAAAACTCCGTGGCTTACTCAAACAACAGCATCGCCATCC
CCACAAACTTCACCATATCCGTGACAACTGAGATTCTGCCAGTGTCCATGACTAAGACGTCC
GTAGATTGCACTATGTACATATGCGGCGACAGCACAGAATGTTCTAATCTGCTGCTGCAATA
TGGAAGCTTCTGCACTCAACTGAACAGAGCGCTCACAGGCATCGCCGTGGAGCAGGATAAGA
ATACCCAGGAGGTGTTCGCCCAAGTTAAGCAGATCTACAAGACCCCACCCATAAAGGATTTC
GGTGGATTCAATTTTAGTCAGATACTCCCAGACCCATCTAAGCCATCCAAGAGGAGCTTTAT
CGAGGATCTTTTGTTTAACAAAGTTACTCTGGCCGACGCCGGTTTCATCAAGCAGTACGGAG
ATTGCCTCGGCGACATCGCTGCTCGTGACCTCATCTGTGCGCAAAAGTTTAACGGTCTGACG
GTGCTGCCTCCCCTCCTTACTGATGAAATGATCGCCCAGTATACCAGCGCACTCCTCGCTGG
CACCATAACATCCGGTTGGACATTCGGCGCTGGTGCAGCACTGCAGATACCATTCGCCATGC
AAATGGCATATCGTTTCAACGGTATCGGTGTCACACAGAATGTCCTATATGAGAACCAGAAG
CTGATCGCAAATCAGTTCAATAGTGCCATCGGAAAAATCCAGGATAGCCTTAGCAGCACAGC
CTCAGCCCTTGGCAAACTCCAGGATGTCGTGAACCAGAATGCCCAGGCTCTCAATACCCTCG
TGAAGCAGCTCTCATCTAATTTCGGCGCAATTTCCAGTGTCCTCAACGACATCCTCAGCCGC
CTCGACCCCCCCGAGGCCGAAGTGCAGATTGACAGACTGATTACAGGTCGACTCCAGAGCCT
CCAGACTTACGTGACTCAGCAGCTGATAAGAGCCGCCGAGATAAGGGCCAGCGCTAACCTGG
CTGCCACAAAGATGTCTGAGTGCGTGCTGGGCCAGTCCAAGAGAGTAGACTTCTGTGGCAAA
GGCTACCATCTGATGAGCTTCCCACAATCCGCACCTCACGGCGTAGTGTTCCTCCACGTGAC
ATATGTACCGGCTCAGGAGAAGAATTTCACTACCGCTCCTGCTATATGCCATGATGGAAAGG
CTCACTTCCCCCGGGAGGGGGTGTTCGTGTCCAACGGCACCCATTGGTTTGTGACTCAGCGG
AATTTCTACGAACCCCAGATCATAACCACTGACAACACATTTGTGTCCGGAAATTGTGACGT
GGTCATTGGAATAGTGAACAACACTGTTTATGATCCACTGCAGCCAGAACTTGACAGCTTTA
AGGAGGAGCTCGACAAGTACTTCAAGAATCATACGTCACCAGATGTGGACCTCGGAGATATT
AGCGGTATCAATGCCAGTGTTGTCAATATTCAGAAGGAAATAGACCGCCTTAATGAGGTCGC
CAAAAATCTGAACGAGAGCCTCATCGATCTTCAGGAGCTGGGCAAATATGAGCAGTACATCA
AGTGGCCTTGGTATATTTGGCTTGGCTTCATCGCCGGCCTGATCGCCATAGTAATGGTCACA
ATTATGCTCTCTTTATGGATGTGCTCCAATGGATCGTTACAATGCAGAATTTGCATTTAA
PDI-Modified SARS-CoV-2 S protein GSAS + PP wtTM/H5iCT-AA
(SEQ ID NO: 30)
MAKNVAIFGLLFSLLVLVPSQIFAVNLTTRTQLPPAYTNSFTRGVYYPDKVFRSSVLHSTQD
LFLPFFSNVTWFHAIHVSGTNGTKRFDNPVLPFNDGVYFASTEKSNIIRGWIFGTTLDSKTQ
SLLIVNNATNVVIKVCEFQFCNDPFLGVYYHKNNKSWMESEFRVYSSANNCTFEYVSQPFLM
DLEGKQGNFKNLREFVFKNIDGYFKIYSKHTPINLVRDLPQGFSALEPLVDLPIGINITRFQ
TLLALHRSYLTPGDSSSGWTAGAAAYYVGYLQPRTFLLKYNENGTITDAVDCALDPLSETKC
TLKSFTVEKGIYQTSNFRVQPTESIVRFPNITNLCPFGEVFNATRFASVYAWNRKRISNCVA
DYSVLYNSASFSTFKCYGVSPTKLNDLCFTNVYADSFVIRGDEVRQIAPGQTGKIADYNYKL
PDDFTGCVIAWNSNNLDSKVGGNYNYLYRLFRKSNLKPFERDISTEIYQAGSTPCNGVEGFN
CYFPLQSYGFQPTNGVGYQPYRVVVLSFELLHAPATVCGPKKSTNLVKNKCVNFNFNGLTGT
GVLTESNKKFLPFQQFGRDIADTTDAVRDPQTLEILDITPCSFGGVSVITPGTNTSNQVAVL
YQDVNCTEVPVAIHADQLTPTWRVYSTGSNVFQTRAGCLIGAEHVNNSYECDIPIGAGICAS
YQTQTNSPGSASSVASQSIIAYTMSLGAENSVAYSNNSIAIPTNFTISVTTEILPVSMTKTS
VDCTMYICGDSTECSNLLLQYGSFCTQLNRALTGIAVEQDKNTQEVFAQVKQIYKTPPIKDF
GGFNFSQILPDPSKPSKRSFIEDLLFNKVTLADAGFIKQYGDCLGDIAARDLICAQKFNGLT
VLPPLLTDEMIAQYTSALLAGTITSGWTFGAGAALQIPFAMQMAYRFNGIGVTQNVLYENQK
LIANQFNSAIGKIQDSLSSTASALGKLQDVVNQNAQALNTLVKQLSSNFGAISSVLNDILSR
LDPPEAEVQIDRLITGRLQSLQTYVTQQLIRAAEIRASANLAATKMSECVLGQSKRVDFCGK
GYHLMSFPQSAPHGVVFLHVTYVPAQEKNFTTAPAICHDGKAHFPREGVFVSNGTHWFVTQR
NFYEPQIITTDNTFVSGNCDVVIGIVNNTVYDPLQPELDSFKEELDKYFKNHTSPDVDLGDI
SGINASVVNIQKEIDRLNEVAKNLNESLIDLQELGKYEQYIKWPWYIWLGFIAGLIAIVMVT
IMLSLWMCSNGSLQCRICI
Cloning vector 8501 from left to right T-DNA
(SEQ ID NO: 31)
TGGCAGGATATATTGTGGTGTAAACAAATTGACGCTTAGACAACTTAATAACACATTGCGGA
CGTTTTTAATGTACTGAATTAACGCCGAATCCCGGGCTGGTATATTTATATGTTGTCAAATA
ACTCAAAAACCATAAAAGTTTAAGTTAGCAAGTGTGTACATTTTTACTTGAACAAAAATATT
CACCTACTACTGTTATAAATCATTATTAAACATTAGAGTAAAGAAATATGGATGATAAGAAC
AAGAGTAGTGATATTTTGACAACAATTTTGTTGCAACATTTGAGAAAATTTTGTTGTTCTCT
CTTTTCATTGGTCAAAAACAATAGAGAGAGAAAAAGGAAGAGGGAGAATAAAAACATAATGT
GAGTATGAGAGAGAAAGTTGTACAAAAGTTGTACCAAAATAGTTGTACAAATATCATTGAGG
AATTTGACAAAAGCTACACAAATAAGGGTTAATTGCTGTAAATAAATAAGGATGACGCATTA
GAGAGATGTACCATTAGAGAATTTTTGGCAAGTCATTAAAAAGAAAGAATAAATTATTTTTA
AAATTAAAAGTTGAGTCATTTGATTAAACATGTGATTATTTAATGAATTGATGAAAGAGTTG
GATTAAAGTTGTATTAGTAATTAGAATTTGGTGTCAAATTTAATTTGACATTTGATCTTTTC
CTATATATTGCCCCATAGAGTCAGTTAACTCATTTTTATATTTCATAGATCAAATAAGAGAA
ATAACGGTATATTAATCCCTCCAAAAAAAAAAAACGGTATATTTACTAAAAAATCTAAGCCA
CGTAGGAGGATAACAGGATCCCCGTAGGAGGATAACATCCAATCCAACCAATCACAACAATC
CTGATGAGATAACCCACTTTAAGCCCACGCATCTGTGGCACATCTACATTATCTAAATCACA
CATTCTTCCACACATCTGAGCCACACAAAAACCAATCCACATCTTTATCACCCATTCTATAA
AAAATCACACTTTGTGAGTCTACACTTTGATTCCCTTCAAACACATACAAAGAGAAGAGACT
AATTAATTAATTAATCATCTTGAGAGAAAATGGAACGAGCTATACAAGGAAACGACGCTAGG
GAACAAGCTAACAGTGAACGTTGGGATGGAGGATCAGGAGGTACCACTTCTCCCTTCAAACT
TCCTGACGAAAGTCCGAGTTGGACTGAGTGGCGGCTACATAACGATGAGACGAATTCGAATC
AAGATAATCCCCTTGGTTTCAAGGAAAGCTGGGGTTTCGGGAAAGTTGTATTTAAGAGATAT
CTCAGATACGACAGGACGGAAGCTTCACTGCACAGAGTCCTTGGATCTTGGACGGGAGATTC
GGTTAACTATGCAGCATCTCGATTTTTCGGTTTCGACCAGATCGGATGTACCTATAGTATTC
GGTTTCGAGGAGTTAGTATCACCGTTTCTGGAGGGTCGCGAACTCTTCAGCATCTCTGTGAG
ATGGCAATTCGGTCTAAGCAAGAACTGCTACAGCTTGCCCCAATCGAAGTGGAAAGTAATGT
ATCAAGAGGATGCCCTGAAGGTACTCAAACCTTCGAAAAAGAAAGCGAGTAAGTTAAAATGC
TTCTTCGTCTCCTATTTATAATATGGTTTGTTATTGTTAATTTTGTTCTTGTAGAAGAGCTT
AATTAATCGTTGTTGTTATGAAATACTATTTGTATGAGATGAACTGGTGTAATGTAATTCAT
TTACATAAGTGGAGTCAGAATCAGAATGTTTCCTCCATAACTAACTAGACATGAAGACCTGC
CGCGTACAATTGTCTTATATTTGAACAACTAAAATTGAACATCTTTTGCCACAACTTTATAA
GTGGTTAATATAGCTCAAATATATGGTCAAGTTCAATAGATTAATAATGGAAATATCAGTTA
TCGAAATTCATTAACAATCAACTTAACGTTATTAACTACTAATTTTATATCATCCCCTTTGA
TAAATGATAGTACACCAATTAGGAAGGAGCATGCTCGCCTAGGAGATTGTCGTTTCCCGCCT
TCAGTTTGCAAGCTGCTCTAGCCGTGTAGCCAATACGCAAACCGCCTCTCCCCGCGCGTTGG
GAATTACTAGCGCGTGTCGACAAGCTTGCATGCCGGTCAACATGGTGGAGCACGACACACTT
GTCTACTCCAAAAATATCAAAGATACAGTCTCAGAAGACCAAAGGGCAATTGAGACTTTTCA
ACAAAGGGTAATATCCGGAAACCTCCTCGGATTCCATTGCCCAGCTATCTGTCACTTTATTG
TGAAGATAGTGGAAAAGGAAGGTGGCTCCTACAAATGCCATCATTGCGATAAAGGAAAGGCC
ATCGTTGAAGATGCCTCTGCCGACAGTGGTCCCAAAGATGGACCCCCACCCACGAGGAGCAT
CGTGGAAAAAGAAGACGTTCCAACCACGTCTTCAAAGCAAGTGGATTGATGTGATAACATGG
TGGAGCACGACACACTTGTCTACTCCAAAAATATCAAAGATACAGTCTCAGAAGACCAAAGG
GCAATTGAGACTTTTCAACAAAGGGTAATATCCGGAAACCTCCTCGGATTCCATTGCCCAGC
TATCTGTCACTTTATTGTGAAGATAGTGGAAAAGGAAGGTGGCTCCTACAAATGCCATCATT
GCGATAAAGGAAAGGCCATCGTTGAAGATGCCTCTGCCGACAGTGGTCCCAAAGATGGACCC
CCACCCACGAGGAGCATCGTGGAAAAAGAAGACGTTCCAACCACGTCTTCAAAGCAAGTGGA
TTGATGTGATATCTCCACTGACGTAAGGGATGACGCACAATCCCACTATCCTTCGCAAGACC
CTTCCTCTATATAAGGAAGTTCATTTCATTTGGAGAGGCACACAATTTGCTTTAGTGATTAA
ACTTTCTTTTACAACAAATTAAAGGTCTATTATCTCCCAACAACATAAGAAAACAATGGCGA
AAAACGTTGCGATTTTCGGCTTATTGTTTTCTCTTCTTGTGTTGGTTCCTTCTCAGATCTTC
GCGACGTCACTCCTCAGCCAAAACGACACCCCCATCTGTCTATCCACTGGCCCCTGGATCTG
CTGCCCAAACTAACTCCATGGTGACCCTGGGATGCCTGGTCAAGGGCTATTTCCCTGAGCCA
GTGACAGTGACCTGGAACTCTGGATCCCTGTCCAGCGGTGTGCACACCTTCCCAGCTGTCCT
GCAGTCTGACCTCTACACTCTGAGCAGCTCAGTGACTGTCCCCTCCAGCACCTGGCCCAGCG
AGACCGTCACCTGCAACGTTGCCCACCCGGCCAGCAGCACCAAGGTGGACAAGAAAATTGTG
CCCAGGGATTGTGGTTGTAAGCCTTGCATATGTACAGTCCCAGAAGTATCATCTGTCTTCAT
CTTCCCCCCAAAGCCCAAGGATGTGCTCACCATTACTCTGACTCCTAAGGTCACGTGTGTTG
TGGTAGACATCAGCAAGGATGATCCCGAGGTCCAGTTCAGCTGGTTTGTAGATGATGTGGAG
GTGCACACAGCTCAGACGCAACCCCGGGAGGAGCAGTTCAACAGCACTTTCCGCTCAGTCAG
TGAACTTCCCATCATGCACCAGGACTGGCTCAATGGCAAGGAGACGTCCAGATTTTGGCGAT
CTATTCAACTGTCGCCAGTTCATTGGTACTGGTAGTCTCCCTGGGGGCAATCAGTTTCTGGA
TGTGCTCTAATGGGTCTCTACAGTGTAGAATATGTATTTAAAGGCCTTAGTCGTGTCGTTTT
TCAAATAATATAATCCTTTTAGGGTTTTAGTTAGTTTAAATTTTCTGTTGCTCCTGTTTAGC
AGGTCGTGCCTTCAGCAAGCACACAAAAACAGAGTGTTTATTTTAAGTTGTTTGTTTAGTGA
TTCAAAAAAAAAATCGTTCAAACATTTGGCAATAAAGTTTCTTAAGATTGAATCCTGTTGCC
GGTCTTGCGATGATTATCATATAATTTCTGTTGAATTACGTTAAGCATGTAATAATTAACAT
GTAATGCATGACGTTATTTATGAGATGGGTTTTTATGATTAGAGTCCCGCAATTATACATTT
AATACGCGATAGAAAACAAAATATAGCGCGCAAACTAGGATAAATTATCGCGCGCGGTGTCA
TCTATGTTACTAGATCTCTAGAGTCTCAAGCTTGGCGCGCCCACGTGACTAGTGGCACTGGC
CGTCGTTTTACAACGTCGTGACTGGGAAAACCCTGGCGTTACCCAACTTAATCGCCTTGCAG
CACATCCCCCTTTCGCCAGCTGGCGTAATAGCGAAGAGGCCCGCACCGATCGCCCTTCCCAA
CAGTTGCGCAGCCTGAATGGCGAATGCTAGAGCAGCTTGAGCTTGGATCAGATTGTCGTTTC
CCGCCTTCAGTTTAAACTATCAGTGTTTGACAGGATATATTGGCGGGTAAACCTAAGAGAAA
AGAGCGTTTA
Construct 8586 from 2X35S prom to NOS term
(SEQ ID NO: 32)
GTCAACATGGTGGAGCACGACACACTTGTCTACTCCAAAAATATCAAAGATACAGTCTCAGA
AGACCAAAGGGCAATTGAGACTTTTCAACAAAGGGTAATATCCGGAAACCTCCTCGGATTCC
ATTGCCCAGCTATCTGTCACTTTATTGTGAAGATAGTGGAAAAGGAAGGTGGCTCCTACAAA
TGCCATCATTGCGATAAAGGAAAGGCCATCGTTGAAGATGCCTCTGCCGACAGTGGTCCCAA
AGATGGACCCCCACCCACGAGGAGCATCGTGGAAAAAGAAGACGTTCCAACCACGTCTTCAA
AGCAAGTGGATTGATGTGATAACATGGTGGAGCACGACACACTTGTCTACTCCAAAAATATC
AAAGATACAGTCTCAGAAGACCAAAGGGCAATTGAGACTTTTCAACAAAGGGTAATATCCGG
AAACCTCCTCGGATTCCATTGCCCAGCTATCTGTCACTTTATTGTGAAGATAGTGGAAAAGG
AAGGTGGCTCCTACAAATGCCATCATTGCGATAAAGGAAAGGCCATCGTTGAAGATGCCTCT
GCCGACAGTGGTCCCAAAGATGGACCCCCACCCACGAGGAGCATCGTGGAAAAAGAAGACGT
TCCAACCACGTCTTCAAAGCAAGTGGATTGATGTGATATCTCCACTGACGTAAGGGATGACG
CACAATCCCACTATCCTTCGCAAGACCCTTCCTCTATATAAGGAAGTTCATTTCATTTGGAG
AGGCACACAATTTGCTTTAGTGATTAAACTTTCTTTTACAACAAATTAAAGGTCTATTATCT
CCCAACAACATAAGAAAACAATGGCGAAAAACGTTGCGATTTTCGGCTTATTGTTTTCTCTT
CTTGTGTTGGTTCCTTCTCAGATCTTCGCGGTGAATCTTACGACGCGAACACAGTTACCACC
CGCATATACAAATAGCTTCACTCGGGGTGTTTATTACCCCGACAAAGTGTTCAGGTCCTCCG
TGCTCCACTCAACACAGGACCTCTTTCTTCCTTTCTTTTCTAACGTGACATGGTTTCATGCC
ATTCATGTATCCGGCACTAACGGTACTAAGAGGTTCGATAATCCTGTGCTCCCTTTCAATGA
CGGCGTTTACTTTGCAAGCACAGAGAAGAGTAACATCATCCGAGGTTGGATCTTTGGCACTA
CCCTCGATTCAAAGACGCAGAGCCTCCTCATTGTGAACAATGCCACTAACGTGGTGATCAAA
GTTTGCGAGTTTCAGTTCTGCAATGACCCTTTCTTGGGGGTGTACTATCATAAGAACAACAA
GTCTTGGATGGAATCTGAATTCCGCGTCTATAGCAGCGCCAACAACTGCACCTTTGAATACG
TGTCCCAGCCCTTCCTTATGGACCTGGAGGGAAAGCAGGGAAACTTTAAGAATCTGAGAGAG
TTCGTGTTTAAAAATATCGACGGCTATTTTAAGATCTATTCTAAGCACACGCCTATTAATCT
CGTGCGCGATCTTCCACAAGGCTTCAGCGCCCTGGAACCACTCGTGGACCTCCCAATTGGTA
TCAACATCACTAGATTTCAGACTCTGCTTGCCCTCCACCGATCCTATCTGACACCCGGAGAC
TCCTCTAGCGGCTGGACTGCCGGCGCTGCCGCTTATTACGTTGGTTATCTTCAGCCACGCAC
GTTCCTGCTGAAGTATAACGAGAATGGTACTATTACCGATGCCGTGGATTGTGCCCTTGACC
CCCTGTCCGAAACTAAGTGCACACTCAAGTCATTCACTGTGGAAAAAGGAATCTACCAGACA
AGCAATTTTCGGGTCCAGCCTACTGAGAGCATTGTGCGCTTTCCTAACATCACAAATCTTTG
CCCCTTCGGAGAGGTTTTCAATGCTACACGGTTTGCCTCCGTGTATGCCTGGAACCGCAAGA
GAATTTCCAATTGCGTGGCCGATTACTCCGTGCTCTACAATAGTGCAAGCTTTAGCACCTTT
AAGTGCTATGGCGTATCCCCTACTAAGCTTAACGACTTGTGTTTCACAAACGTGTATGCCGA
CTCCTTTGTGATACGGGGCGACGAAGTTAGACAGATAGCACCAGGACAGACGGGAAAGATAG
CTGACTACAACTATAAGCTTCCTGATGACTTCACTGGCTGCGTTATCGCGTGGAATTCTAAC
AACCTGGACTCAAAAGTCGGCGGCAACTATAACTATCTCTATCGGCTGTTCCGCAAGAGTAA
CCTTAAGCCCTTTGAGAGAGATATAAGCACTGAAATCTACCAGGCTGGCAGTACGCCCTGTA
ATGGCGTGGAAGGCTTTAATTGTTATTTTCCACTGCAATCCTATGGTTTTCAGCCAACCAAT
GGCGTGGGCTACCAACCATACCGCGTCGTGGTGCTCTCCTTTGAACTGCTCCACGCTCCCGC
GACTGTCTGCGGCCCCAAGAAGTCCACGAACCTTGTGAAGAATAAGTGCGTTAATTTTAATT
TCAACGGCCTCACTGGAACAGGAGTGCTCACTGAGAGTAACAAGAAGTTCCTGCCATTTCAA
CAATTTGGCAGAGACATAGCCGATACTACTGACGCCGTTAGGGACCCCCAGACCCTCGAGAT
TCTCGATATAACGCCCTGCTCCTTCGGTGGAGTTTCCGTGATCACGCCAGGCACCAATACCA
GTAACCAGGTCGCCGTGCTGTATCAGGATGTCAACTGTACTGAGGTGCCCGTAGCCATCCAT
GCGGATCAGCTCACACCAACTTGGAGGGTGTACAGCACCGGCTCCAATGTATTCCAGACTCG
GGCCGGATGCCTTATTGGCGCCGAACACGTGAACAATAGTTACGAATGCGATATTCCAATTG
GCGCCGGAATCTGTGCTAGCTACCAGACTCAGACGAACTCCCCAGGCAGCGCCAGCAGCGTT
GCCAGCCAGTCAATCATCGCTTATACAATGTCACTTGGAGCCGAAAACTCCGTGGCTTACTC
AAACAACAGCATCGCCATCCCCACAAACTTCACCATATCCGTGACAACTGAGATTCTGCCAG
TGTCCATGACTAAGACGTCCGTAGATTGCACTATGTACATATGCGGCGACAGCACAGAATGT
TCTAATCTGCTGCTGCAATATGGAAGCTTCTGCACTCAACTGAACAGAGCGCTCACAGGCAT
CGCCGTGGAGCAGGATAAGAATACCCAGGAGGTGTTCGCCCAAGTTAAGCAGATCTACAAGA
CCCCACCCATAAAGGATTTCGGTGGATTCAATTTTAGTCAGATACTCCCAGACCCATCTAAG
CCATCCAAGAGGAGCTTTATCGAGGATCTTTTGTTTAACAAAGTTACTCTGGCCGACGCCGG
TTTCATCAAGCAGTACGGAGATTGCCTCGGCGACATCGCTGCTCGTGACCTCATCTGTGCGC
AAAAGTTTAACGGTCTGACGGTGCTGCCTCCCCTCCTTACTGATGAAATGATCGCCCAGTAT
ACCAGCGCACTCCTCGCTGGCACCATAACATCCGGTTGGACATTCGGCGCTGGTGCAGCACT
GCAGATACCATTCGCCATGCAAATGGCATATCGTTTCAACGGTATCGGTGTCACACAGAATG
TCCTATATGAGAACCAGAAGCTGATCGCAAATCAGTTCAATAGTGCCATCGGAAAAATCCAG
GATAGCCTTAGCAGCACAGCCTCAGCCCTTGGCAAACTCCAGGATGTCGTGAACCAGAATGC
CCAGGCTCTCAATACCCTCGTGAAGCAGCTCTCATCTAATTTCGGCGCAATTTCCAGTGTCC
TCAACGACATCCTCAGCCGCCTCGACCCCCCCGAGGCCGAAGTGCAGATTGACAGACTGATT
ACAGGTCGACTCCAGAGCCTCCAGACTTACGTGACTCAGCAGCTGATAAGAGCCGCCGAGAT
AAGGGCCAGCGCTAACCTGGCTGCCACAAAGATGTCTGAGTGCGTGCTGGGCCAGTCCAAGA
GAGTAGACTTCTGTGGCAAAGGCTACCATCTGATGAGCTTCCCACAATCCGCACCTCACGGC
GTAGTGTTCCTCCACGTGACATATGTACCGGCTCAGGAGAAGAATTTCACTACCGCTCCTGC
TATATGCCATGATGGAAAGGCTCACTTCCCCCGGGAGGGGGTGTTCGTGTCCAACGGCACCC
ATTGGTTTGTGACTCAGCGGAATTTCTACGAACCCCAGATCATAACCACTGACAACACATTT
GTGTCCGGAAATTGTGACGTGGTCATTGGAATAGTGAACAACACTGTTTATGATCCACTGCA
GCCAGAACTTGACAGCTTTAAGGAGGAGCTCGACAAGTACTTCAAGAATCATACGTCACCAG
ATGTGGACCTCGGAGATATTAGCGGTATCAATGCCAGTGTTGTCAATATTCAGAAGGAAATA
GACCGCCTTAATGAGGTCGCCAAAAATCTGAACGAGAGCCTCATCGATCTTCAGGAGCTGGG
CAAATATGAGCAGTACATCAAGTGGCCTTGGTATATTTGGCTTGGCTTCATCGCCGGCCTGA
TCGCCATAGTAATGGTCACAATTATGCTCTGCTGCATGACCTCTTGCTGCTCCTGTCTGAAA
GGCTGCTGCTCTTGCGGATCCTGCTGCAAATTTGATGAGGATGACAGTGAACCAGTCCTGAA
GGGCGTGAAGCTGCACTATACTTAGAGGCCTTAGTCGTGTCGTTTTTCAAATAATATAATCC
TTTTAGGGTTTTAGTTAGTTTAAATTTTCTGTTGCTCCTGTTTAGCAGGTCGTGCCTTCAGC
AAGCACACAAAAACAGAGTGTTTATTTTAAGTTGTTTGTTTAGTGATTCAAAAAAAAAATCG
TTCAAACATTTGGCAATAAAGTTTCTTAAGATTGAATCCTGTTGCCGGTCTTGCGATGATTA
TCATATAATTTCTGTTGAATTACGTTAAGCATGTAATAATTAACATGTAATGCATGACGTTA
TTTATGAGATGGGTTTTTATGATTAGAGTCCCGCAATTATACATTTAATACGCGATAGAAAA
CAAAATATAGCGCGCAAACTAGGATAAATTATCGCGCGCGGTGTCATCTATGTTACTAGAT
Cloning vector 8500 from left to right T-DNA
(SEQ ID NO: 33)
TGGCAGGATATATTGTGGTGTAAACAAATTGACGCTTAGACAACTTAATAACACATTGCGGA
CGTTTTTAATGTACTGAATTAACGCCGAATCCCGGGCTGGTATATTTATATGTTGTCAAATA
ACTCAAAAACCATAAAAGTTTAAGTTAGCAAGTGTGTACATTTTTACTTGAACAAAAATATT
CACCTACTACTGTTATAAATCATTATTAAACATTAGAGTAAAGAAATATGGATGATAAGAAC
AAGAGTAGTGATATTTTGACAACAATTTTGTTGCAACATTTGAGAAAATTTTGTTGTTCTCT
CTTTTCATTGGTCAAAAACAATAGAGAGAGAAAAAGGAAGAGGGAGAATAAAAACATAATGT
GAGTATGAGAGAGAAAGTTGTACAAAAGTTGTACCAAAATAGTTGTACAAATATCATTGAGG
AATTTGACAAAAGCTACACAAATAAGGGTTAATTGCTGTAAATAAATAAGGATGACGCATTA
GAGAGATGTACCATTAGAGAATTTTTGGCAAGTCATTAAAAAGAAAGAATAAATTATTTTTA
AAATTAAAAGTTGAGTCATTTGATTAAACATGTGATTATTTAATGAATTGATGAAAGAGTTG
GATTAAAGTTGTATTAGTAATTAGAATTTGGTGTCAAATTTAATTTGACATTTGATCTTTTC
CTATATATTGCCCCATAGAGTCAGTTAACTCATTTTTATATTTCATAGATCAAATAAGAGAA
ATAACGGTATATTAATCCCTCCAAAAAAAAAAAACGGTATATTTACTAAAAAATCTAAGCCA
CGTAGGAGGATAACAGGATCCCCGTAGGAGGATAACATCCAATCCAACCAATCACAACAATC
CTGATGAGATAACCCACTTTAAGCCCACGCATCTGTGGCACATCTACATTATCTAAATCACA
CATTCTTCCACACATCTGAGCCACACAAAAACCAATCCACATCTTTATCACCCATTCTATAA
AAAATCACACTTTGTGAGTCTACACTTTGATTCCCTTCAAACACATACAAAGAGAAGAGACT
AATTAATTAATTAATCATCTTGAGAGAAAATGGAACGAGCTATACAAGGAAACGACGCTAGG
GAACAAGCTAACAGTGAACGTTGGGATGGAGGATCAGGAGGTACCACTTCTCCCTTCAAACT
TCCTGACGAAAGTCCGAGTTGGACTGAGTGGCGGCTACATAACGATGAGACGAATTCGAATC
AAGATAATCCCCTTGGTTTCAAGGAAAGCTGGGGTTTCGGGAAAGTTGTATTTAAGAGATAT
CTCAGATACGACAGGACGGAAGCTTCACTGCACAGAGTCCTTGGATCTTGGACGGGAGATTC
GGTTAACTATGCAGCATCTCGATTTTTCGGTTTCGACCAGATCGGATGTACCTATAGTATTC
GGTTTCGAGGAGTTAGTATCACCGTTTCTGGAGGGTCGCGAACTCTTCAGCATCTCTGTGAG
ATGGCAATTCGGTCTAAGCAAGAACTGCTACAGCTTGCCCCAATCGAAGTGGAAAGTAATGT
ATCAAGAGGATGCCCTGAAGGTACTCAAACCTTCGAAAAAGAAAGCGAGTAAGTTAAAATGC
TTCTTCGTCTCCTATTTATAATATGGTTTGTTATTGTTAATTTTGTTCTTGTAGAAGAGCTT
AATTAATCGTTGTTGTTATGAAATACTATTTGTATGAGATGAACTGGTGTAATGTAATTCAT
TTACATAAGTGGAGTCAGAATCAGAATGTTTCCTCCATAACTAACTAGACATGAAGACCTGC
CGCGTACAATTGTCTTATATTTGAACAACTAAAATTGAACATCTTTTGCCACAACTTTATAA
GTGGTTAATATAGCTCAAATATATGGTCAAGTTCAATAGATTAATAATGGAAATATCAGTTA
TCGAAATTCATTAACAATCAACTTAACGTTATTAACTACTAATTTTATATCATCCCCTTTGA
TAAATGATAGTACACCAATTAGGAAGGAGCATGCTCGCCTAGGAGATTGTCGTTTCCCGCCT
TCAGTTTGCAAGCTGCTCTAGCCGTGTAGCCAATACGCAAACCGCCTCTCCCCGCGCGTTGG
GAATTACTAGCGCGTGTCGACAAGCTTGCATGCCGGTCAACATGGTGGAGCACGACACACTT
GTCTACTCCAAAAATATCAAAGATACAGTCTCAGAAGACCAAAGGGCAATTGAGACTTTTCA
ACAAAGGGTAATATCCGGAAACCTCCTCGGATTCCATTGCCCAGCTATCTGTCACTTTATTG
TGAAGATAGTGGAAAAGGAAGGTGGCTCCTACAAATGCCATCATTGCGATAAAGGAAAGGCC
ATCGTTGAAGATGCCTCTGCCGACAGTGGTCCCAAAGATGGACCCCCACCCACGAGGAGCAT
CGTGGAAAAAGAAGACGTTCCAACCACGTCTTCAAAGCAAGTGGATTGATGTGATAACATGG
TGGAGCACGACACACTTGTCTACTCCAAAAATATCAAAGATACAGTCTCAGAAGACCAAAGG
GCAATTGAGACTTTTCAACAAAGGGTAATATCCGGAAACCTCCTCGGATTCCATTGCCCAGC
TATCTGTCACTTTATTGTGAAGATAGTGGAAAAGGAAGGTGGCTCCTACAAATGCCATCATT
GCGATAAAGGAAAGGCCATCGTTGAAGATGCCTCTGCCGACAGTGGTCCCAAAGATGGACCC
CCACCCACGAGGAGCATCGTGGAAAAAGAAGACGTTCCAACCACGTCTTCAAAGCAAGTGGA
TTGATGTGATATCTCCACTGACGTAAGGGATGACGCACAATCCCACTATCCTTCGCAAGACC
CTTCCTCTATATAAGGAAGTTCATTTCATTTGGAGAGGCACTTTTCTAATCAATCATCAAAC
AGAACGCAGAAAATTTCCTAAAAACAAAAAAAAGGCATACAAATGGCGAAAAACGTTGCGAT
TTTCGGCTTATTGTTTTCTCTTCTTGTGTTGGTTCCTTCTCAGATCTTCGCGACGTCACTCC
TCAGCCAAAACGACACCCCCATCTGTCTATCCACTGGCCCCTGGATCTGCTGCCCAAACTAA
CTCCATGGTGACCCTGGGATGCCTGGTCAAGGGCTATTTCCCTGAGCCAGTGACAGTGACCT
GGAACTCTGGATCCCTGTCCAGCGGTGTGCACACCTTCCCAGCTGTCCTGCAGTCTGACCTC
TACACTCTGAGCAGCTCAGTGACTGTCCCCTCCAGCACCTGGCCCAGCGAGACCGTCACCTG
CAACGTTGCCCACCCGGCCAGCAGCACCAAGGTGGACAAGAAAATTGTGCCCAGGGATTGTG
GTTGTAAGCCTTGCATATGTACAGTCCCAGAAGTATCATCTGTCTTCATCTTCCCCCCAAAG
CCCAAGGATGTGCTCACCATTACTCTGACTCCTAAGGTCACGTGTGTTGTGGTAGACATCAG
CAAGGATGATCCCGAGGTCCAGTTCAGCTGGTTTGTAGATGATGTGGAGGTGCACACAGCTC
AGACGCAACCCCGGGAGGAGCAGTTCAACAGCACTTTCCGCTCAGTCAGTGAACTTCCCATC
ATGCACCAGGACTGGCTCAATGGCAAGGAGACGTCCAGATTTTGGCGATCTATTCAACTGTC
GCCAGTTCATTGGTACTGGTAGTCTCCCTGGGGGCAATCAGTTTCTGGATGTGCTCTAATGG
GTCTCTACAGTGTAGAATATGTATTTAAAGGCCTTAGTCGTGTCGTTTTTCAAATAATATAA
TCCTTTTAGGGTTTTAGTTAGTTTAAATTTTCTGTTGCTCCTGTTTAGCAGGTCGTGCCTTC
AGCAAGCACACAAAAACAGAGTGTTTATTTTAAGTTGTTTGTTTAGTGATTCAAAAAAAAAA
TCGTTCAAACATTTGGCAATAAAGTTTCTTAAGATTGAATCCTGTTGCCGGTCTTGCGATGA
TTATCATATAATTTCTGTTGAATTACGTTAAGCATGTAATAATTAACATGTAATGCATGACG
TTATTTATGAGATGGGTTTTTATGATTAGAGTCCCGCAATTATACATTTAATACGCGATAGA
AAACAAAATATAGCGCGCAAACTAGGATAAATTATCGCGCGCGGTGTCATCTATGTTACTAG
ATCTCTAGAGTCTCAAGCTTGGCGCGCCCACGTGACTAGTGGCACTGGCCGTCGTTTTACAA
CGTCGTGACTGGGAAAACCCTGGCGTTACCCAACTTAATCGCCTTGCAGCACATCCCCCTTT
CGCCAGCTGGCGTAATAGCGAAGAGGCCCGCACCGATCGCCCTTCCCAACAGTTGCGCAGCC
TGAATGGCGAATGCTAGAGCAGCTTGAGCTTGGATCAGATTGTCGTTTCCCGCCTTCAGTTT
AAACTATCAGTGTTTGACAGGATATATTGGCGGGTAAACCTAAGAGAAAAGAGCGTTTA
Construct 8589 from 2X35S prom to NOS term
(SEQ ID NO: 34)
GTCAACATGGTGGAGCACGACACACTTGTCTACTCCAAAAATATCAAAGATACAGTCTCAGA
AGACCAAAGGGCAATTGAGACTTTTCAACAAAGGGTAATATCCGGAAACCTCCTCGGATTCC
ATTGCCCAGCTATCTGTCACTTTATTGTGAAGATAGTGGAAAAGGAAGGTGGCTCCTACAAA
TGCCATCATTGCGATAAAGGAAAGGCCATCGTTGAAGATGCCTCTGCCGACAGTGGTCCCAA
AGATGGACCCCCACCCACGAGGAGCATCGTGGAAAAAGAAGACGTTCCAACCACGTCTTCAA
AGCAAGTGGATTGATGTGATAACATGGTGGAGCACGACACACTTGTCTACTCCAAAAATATC
AAAGATACAGTCTCAGAAGACCAAAGGGCAATTGAGACTTTTCAACAAAGGGTAATATCCGG
AAACCTCCTCGGATTCCATTGCCCAGCTATCTGTCACTTTATTGTGAAGATAGTGGAAAAGG
AAGGTGGCTCCTACAAATGCCATCATTGCGATAAAGGAAAGGCCATCGTTGAAGATGCCTCT
GCCGACAGTGGTCCCAAAGATGGACCCCCACCCACGAGGAGCATCGTGGAAAAAGAAGACGT
TCCAACCACGTCTTCAAAGCAAGTGGATTGATGTGATATCTCCACTGACGTAAGGGATGACG
CACAATCCCACTATCCTTCGCAAGACCCTTCCTCTATATAAGGAAGTTCATTTCATTTGGAG
AGGCACTTTTCTAATCAATCATCAAACAGAACGCAGAAAATTTCCTAAAAACAAAAAAAAGG
CATACAAATGGCGAAAAACGTTGCGATTTTCGGCTTATTGTTTTCTCTTCTTGTGTTGGTTC
CTTCTCAGATCTTCGCGGTGAATCTTACGACGCGAACACAGTTACCACCCGCATATACAAAT
AGCTTCACTCGGGGTGTTTATTACCCCGACAAAGTGTTCAGGTCCTCCGTGCTCCACTCAAC
ACAGGACCTCTTTCTTCCTTTCTTTTCTAACGTGACATGGTTTCATGCCATTCATGTATCCG
GCACTAACGGTACTAAGAGGTTCGATAATCCTGTGCTCCCTTTCAATGACGGCGTTTACTTT
GCAAGCACAGAGAAGAGTAACATCATCCGAGGTTGGATCTTTGGCACTACCCTCGATTCAAA
GACGCAGAGCCTCCTCATTGTGAACAATGCCACTAACGTGGTGATCAAAGTTTGCGAGTTTC
AGTTCTGCAATGACCCTTTCTTGGGGGTGTACTATCATAAGAACAACAAGTCTTGGATGGAA
TCTGAATTCCGCGTCTATAGCAGCGCCAACAACTGCACCTTTGAATACGTGTCCCAGCCCTT
CCTTATGGACCTGGAGGGAAAGCAGGGAAACTTTAAGAATCTGAGAGAGTTCGTGTTTAAAA
ATATCGACGGCTATTTTAAGATCTATTCTAAGCACACGCCTATTAATCTCGTGCGCGATCTT
CCACAAGGCTTCAGCGCCCTGGAACCACTCGTGGACCTCCCAATTGGTATCAACATCACTAG
ATTTCAGACTCTGCTTGCCCTCCACCGATCCTATCTGACACCCGGAGACTCCTCTAGCGGCT
GGACTGCCGGCGCTGCCGCTTATTACGTTGGTTATCTTCAGCCACGCACGTTCCTGCTGAAG
TATAACGAGAATGGTACTATTACCGATGCCGTGGATTGTGCCCTTGACCCCCTGTCCGAAAC
TAAGTGCACACTCAAGTCATTCACTGTGGAAAAAGGAATCTACCAGACAAGCAATTTTCGGG
TCCAGCCTACTGAGAGCATTGTGCGCTTTCCTAACATCACAAATCTTTGCCCCTTCGGAGAG
GTTTTCAATGCTACACGGTTTGCCTCCGTGTATGCCTGGAACCGCAAGAGAATTTCCAATTG
CGTGGCCGATTACTCCGTGCTCTACAATAGTGCAAGCTTTAGCACCTTTAAGTGCTATGGCG
TATCCCCTACTAAGCTTAACGACTTGTGTTTCACAAACGTGTATGCCGACTCCTTTGTGATA
CGGGGCGACGAAGTTAGACAGATAGCACCAGGACAGACGGGAAAGATAGCTGACTACAACTA
TAAGCTTCCTGATGACTTCACTGGCTGCGTTATCGCGTGGAATTCTAACAACCTGGACTCAA
AAGTCGGCGGCAACTATAACTATCTCTATCGGCTGTTCCGCAAGAGTAACCTTAAGCCCTTT
GAGAGAGATATAAGCACTGAAATCTACCAGGCTGGCAGTACGCCCTGTAATGGCGTGGAAGG
CTTTAATTGTTATTTTCCACTGCAATCCTATGGTTTTCAGCCAACCAATGGCGTGGGCTACC
AACCATACCGCGTCGTGGTGCTCTCCTTTGAACTGCTCCACGCTCCCGCGACTGTCTGCGGC
CCCAAGAAGTCCACGAACCTTGTGAAGAATAAGTGCGTTAATTTTAATTTCAACGGCCTCAC
TGGAACAGGAGTGCTCACTGAGAGTAACAAGAAGTTCCTGCCATTTCAACAATTTGGCAGAG
ACATAGCCGATACTACTGACGCCGTTAGGGACCCCCAGACCCTCGAGATTCTCGATATAACG
CCCTGCTCCTTCGGTGGAGTTTCCGTGATCACGCCAGGCACCAATACCAGTAACCAGGTCGC
CGTGCTGTATCAGGATGTCAACTGTACTGAGGTGCCCGTAGCCATCCATGCGGATCAGCTCA
CACCAACTTGGAGGGTGTACAGCACCGGCTCCAATGTATTCCAGACTCGGGCCGGATGCCTT
ATTGGCGCCGAACACGTGAACAATAGTTACGAATGCGATATTCCAATTGGCGCCGGAATCTG
TGCTAGCTACCAGACTCAGACGAACTCCCCAGGCAGCGCCAGCAGCGTTGCCAGCCAGTCAA
TCATCGCTTATACAATGTCACTTGGAGCCGAAAACTCCGTGGCTTACTCAAACAACAGCATC
GCCATCCCCACAAACTTCACCATATCCGTGACAACTGAGATTCTGCCAGTGTCCATGACTAA
GACGTCCGTAGATTGCACTATGTACATATGCGGCGACAGCACAGAATGTTCTAATCTGCTGC
TGCAATATGGAAGCTTCTGCACTCAACTGAACAGAGCGCTCACAGGCATCGCCGTGGAGCAG
GATAAGAATACCCAGGAGGTGTTCGCCCAAGTTAAGCAGATCTACAAGACCCCACCCATAAA
GGATTTCGGTGGATTCAATTTTAGTCAGATACTCCCAGACCCATCTAAGCCATCCAAGAGGA
GCTTTATCGAGGATCTTTTGTTTAACAAAGTTACTCTGGCCGACGCCGGTTTCATCAAGCAG
TACGGAGATTGCCTCGGCGACATCGCTGCTCGTGACCTCATCTGTGCGCAAAAGTTTAACGG
TCTGACGGTGCTGCCTCCCCTCCTTACTGATGAAATGATCGCCCAGTATACCAGCGCACTCC
TCGCTGGCACCATAACATCCGGTTGGACATTCGGCGCTGGTGCAGCACTGCAGATACCATTC
GCCATGCAAATGGCATATCGTTTCAACGGTATCGGTGTCACACAGAATGTCCTATATGAGAA
CCAGAAGCTGATCGCAAATCAGTTCAATAGTGCCATCGGAAAAATCCAGGATAGCCTTAGCA
GCACAGCCTCAGCCCTTGGCAAACTCCAGGATGTCGTGAACCAGAATGCCCAGGCTCTCAAT
ACCCTCGTGAAGCAGCTCTCATCTAATTTCGGCGCAATTTCCAGTGTCCTCAACGACATCCT
CAGCCGCCTCGACCCCCCCGAGGCCGAAGTGCAGATTGACAGACTGATTACAGGTCGACTCC
AGAGCCTCCAGACTTACGTGACTCAGCAGCTGATAAGAGCCGCCGAGATAAGGGCCAGCGCT
AACCTGGCTGCCACAAAGATGTCTGAGTGCGTGCTGGGCCAGTCCAAGAGAGTAGACTTCTG
TGGCAAAGGCTACCATCTGATGAGCTTCCCACAATCCGCACCTCACGGCGTAGTGTTCCTCC
ACGTGACATATGTACCGGCTCAGGAGAAGAATTTCACTACCGCTCCTGCTATATGCCATGAT
GGAAAGGCTCACTTCCCCCGGGAGGGGGTGTTCGTGTCCAACGGCACCCATTGGTTTGTGAC
TCAGCGGAATTTCTACGAACCCCAGATCATAACCACTGACAACACATTTGTGTCCGGAAATT
GTGACGTGGTCATTGGAATAGTGAACAACACTGTTTATGATCCACTGCAGCCAGAACTTGAC
AGCTTTAAGGAGGAGCTCGACAAGTACTTCAAGAATCATACGTCACCAGATGTGGACCTCGG
AGATATTAGCGGTATCAATGCCAGTGTTGTCAATATTCAGAAGGAAATAGACCGCCTTAATG
AGGTCGCCAAAAATCTGAACGAGAGCCTCATCGATCTTCAGGAGCTGGGCAAATATGAGCAG
TACATCAAGTGGCCTTGGTATATTTGGCTTGGCTTCATCGCCGGCCTGATCGCCATAGTAAT
GGTCACAATTATGCTCTGCTGCATGACCTCTTGCTGCTCCTGTCTGAAAGGCTGCTGCTCTT
GCGGATCCTGCTGCAAATTTGATGAGGATGACAGTGAACCAGTCCTGAAGGGCGTGAAGCTG
CACTATACTTAGAGGCCTTAGTCGTGTCGTTTTTCAAATAATATAATCCTTTTAGGGTTTTA
GTTAGTTTAAATTTTCTGTTGCTCCTGTTTAGCAGGTCGTGCCTTCAGCAAGCACACAAAAA
CAGAGTGTTTATTTTAAGTTGTTTGTTTAGTGATTCAAAAAAAAAATCGTTCAAACATTTGG
CAATAAAGTTTCTTAAGATTGAATCCTGTTGCCGGTCTTGCGATGATTATCATATAATTTCT
GTTGAATTACGTTAAGCATGTAATAATTAACATGTAATGCATGACGTTATTTATGAGATGGG
TTTTTATGATTAGAGTCCCGCAATTATACATTTAATACGCGATAGAAAACAAAATATAGCGC
GCAAACTAGGATAAATTATCGCGCGCGGTGTCATCTATGTTACTAGAT
Cloning vector 8716 from left to right T-DNA
(SEQ ID NO: 35)
TGGCAGGATATATTGTGGTGTAAACAAATTGACGCTTAGACAACTTAATAACACATTGCGGA
CGTTTTTAATGTACTGAATTAACGCCGAATCCCGGGCTGGTATATTTATATGTTGTCAAATA
ACTCAAAAACCATAAAAGTTTAAGTTAGCAAGTGTGTACATTTTTACTTGAACAAAAATATT
CACCTACTACTGTTATAAATCATTATTAAACATTAGAGTAAAGAAATATGGATGATAAGAAC
AAGAGTAGTGATATTTTGACAACAATTTTGTTGCAACATTTGAGAAAATTTTGTTGTTCTCT
CTTTTCATTGGTCAAAAACAATAGAGAGAGAAAAAGGAAGAGGGAGAATAAAAACATAATGT
GAGTATGAGAGAGAAAGTTGTACAAAAGTTGTACCAAAATAGTTGTACAAATATCATTGAGG
AATTTGACAAAAGCTACACAAATAAGGGTTAATTGCTGTAAATAAATAAGGATGACGCATTA
GAGAGATGTACCATTAGAGAATTTTTGGCAAGTCATTAAAAAGAAAGAATAAATTATTTTTA
AAATTAAAAGTTGAGTCATTTGATTAAACATGTGATTATTTAATGAATTGATGAAAGAGTTG
GATTAAAGTTGTATTAGTAATTAGAATTTGGTGTCAAATTTAATTTGACATTTGATCTTTTC
CTATATATTGCCCCATAGAGTCAGTTAACTCATTTTTATATTTCATAGATCAAATAAGAGAA
ATAACGGTATATTAATCCCTCCAAAAAAAAAAAACGGTATATTTACTAAAAAATCTAAGCCA
CGTAGGAGGATAACAGGATCCCCGTAGGAGGATAACATCCAATCCAACCAATCACAACAATC
CTGATGAGATAACCCACTTTAAGCCCACGCATCTGTGGCACATCTACATTATCTAAATCACA
CATTCTTCCACACATCTGAGCCACACAAAAACCAATCCACATCTTTATCACCCATTCTATAA
AAAATCACACTTTGTGAGTCTACACTTTGATTCCCTTCAAACACATACAAAGAGAAGAGACT
AATTAATTAATTAATCATCTTGAGAGAAAATGGAACGAGCTATACAAGGAAACGACGCTAGG
GAACAAGCTAACAGTGAACGTTGGGATGGAGGATCAGGAGGTACCACTTCTCCCTTCAAACT
TCCTGACGAAAGTCCGAGTTGGACTGAGTGGCGGCTACATAACGATGAGACGAATTCGAATC
AAGATAATCCCCTTGGTTTCAAGGAAAGCTGGGGTTTCGGGAAAGTTGTATTTAAGAGATAT
CTCAGATACGACAGGACGGAAGCTTCACTGCACAGAGTCCTTGGATCTTGGACGGGAGATTC
GGTTAACTATGCAGCATCTCGATTTTTCGGTTTCGACCAGATCGGATGTACCTATAGTATTC
GGTTTCGAGGAGTTAGTATCACCGTTTCTGGAGGGTCGCGAACTCTTCAGCATCTCTGTGAG
ATGGCAATTCGGTCTAAGCAAGAACTGCTACAGCTTGCCCCAATCGAAGTGGAAAGTAATGT
ATCAAGAGGATGCCCTGAAGGTACTCAAACCTTCGAAAAAGAAAGCGAGTAAGTTAAAATGC
TTCTTCGTCTCCTATTTATAATATGGTTTGTTATTGTTAATTTTGTTCTTGTAGAAGAGCTT
AATTAATCGTTGTTGTTATGAAATACTATTTGTATGAGATGAACTGGTGTAATGTAATTCAT
TTACATAAGTGGAGTCAGAATCAGAATGTTTCCTCCATAACTAACTAGACATGAAGACCTGC
CGCGTACAATTGTCTTATATTTGAACAACTAAAATTGAACATCTTTTGCCACAACTTTATAA
GTGGTTAATATAGCTCAAATATATGGTCAAGTTCAATAGATTAATAATGGAAATATCAGTTA
TCGAAATTCATTAACAATCAACTTAACGTTATTAACTACTAATTTTATATCATCCCCTTTGA
TAAATGATAGTACACCAATTAGGAAGGAGCATGCTCGCCTAGGAGATTGTCGTTTCCCGCCT
TCAGTTTGCAAGCTGCTCTAGCCGTGTAGCCAATACGCAAACCGCCTCTCCCCGCGCGTTGG
GAATTACTAGCGCGTGTCGACAAGCTTGCATGCCGGTCAACATGGTGGAGCACGACACACTT
GTCTACTCCAAAAATATCAAAGATACAGTCTCAGAAGACCAAAGGGCAATTGAGACTTTTCA
ACAAAGGGTAATATCCGGAAACCTCCTCGGATTCCATTGCCCAGCTATCTGTCACTTTATTG
TGAAGATAGTGGAAAAGGAAGGTGGCTCCTACAAATGCCATCATTGCGATAAAGGAAAGGCC
ATCGTTGAAGATGCCTCTGCCGACAGTGGTCCCAAAGATGGACCCCCACCCACGAGGAGCAT
CGTGGAAAAAGAAGACGTTCCAACCACGTCTTCAAAGCAAGTGGATTGATGTGATAACATGG
TGGAGCACGACACACTTGTCTACTCCAAAAATATCAAAGATACAGTCTCAGAAGACCAAAGG
GCAATTGAGACTTTTCAACAAAGGGTAATATCCGGAAACCTCCTCGGATTCCATTGCCCAGC
TATCTGTCACTTTATTGTGAAGATAGTGGAAAAGGAAGGTGGCTCCTACAAATGCCATCATT
GCGATAAAGGAAAGGCCATCGTTGAAGATGCCTCTGCCGACAGTGGTCCCAAAGATGGACCC
CCACCCACGAGGAGCATCGTGGAAAAAGAAGACGTTCCAACCACGTCTTCAAAGCAAGTGGA
TTGATGTGATATCTCCACTGACGTAAGGGATGACGCACAATCCCACTATCCTTCGCAAGACC
CTTCCTCTATATAAGGAAGTTCATTTCATTTGGAGAGGCACTCCATTTGAATCTATCAAACC
AAAACACATTGAGCAAAATGGCGAAAAACGTTGCGATTTTCGGCTTATTGTTTTCTCTTCTT
GTGTTGGTTCCTTCTCAGATCTTCGCGACGTCACTCCTCAGCCAAAACGACACCCCCATCTG
TCTATCCACTGGCCCCTGGATCTGCTGCCCAAACTAACTCCATGGTGACCCTGGGATGCCTG
GTCAAGGGCTATTTCCCTGAGCCAGTGACAGTGACCTGGAACTCTGGATCCCTGTCCAGCGG
TGTGCACACCTTCCCAGCTGTCCTGCAGTCTGACCTCTACACTCTGAGCAGCTCAGTGACTG
TCCCCTCCAGCACCTGGCCCAGCGAGACCGTCACCTGCAACGTTGCCCACCCGGCCAGCAGC
ACCAAGGTGGACAAGAAAATTGTGCCCAGGGATTGTGGTTGTAAGCCTTGCATATGTACAGT
CCCAGAAGTATCATCTGTCTTCATCTTCCCCCCAAAGCCCAAGGATGTGCTCACCATTACTC
TGACTCCTAAGGTCACGTGTGTTGTGGTAGACATCAGCAAGGATGATCCCGAGGTCCAGTTC
AGCTGGTTTGTAGATGATGTGGAGGTGCACACAGCTCAGACGCAACCCCGGGAGGAGCAGTT
CAACAGCACTTTCCGCTCAGTCAGTGAACTTCCCATCATGCACCAGGACTGGCTCAATGGCA
AGGAGACGTCCAGATTTTGGCGATCTATTCAACTGTCGCCAGTTCATTGGTACTGGTAGTCT
CCCTGGGGGCAATCAGTTTCTGGATGTGCTCTAATGGGTCTCTACAGTGTAGAATATGTATT
TAAAGGCCTTAGTCGTGTCGTTTTTCAAATAATATAATCCTTTTAGGGTTTTAGTTAGTTTA
AATTTTCTGTTGCTCCTGTTTAGCAGGTCGTGCCTTCAGCAAGCACACAAAAACAGAGTGTT
TATTTTAAGTTGTTTGTTTAGTGATTCAAAAAAAAAATCGTTCAAACATTTGGCAATAAAGT
TTCTTAAGATTGAATCCTGTTGCCGGTCTTGCGATGATTATCATATAATTTCTGTTGAATTA
CGTTAAGCATGTAATAATTAACATGTAATGCATGACGTTATTTATGAGATGGGTTTTTATGA
TTAGAGTCCCGCAATTATACATTTAATACGCGATAGAAAACAAAATATAGCGCGCAAACTAG
GATAAATTATCGCGCGCGGTGTCATCTATGTTACTAGATCTCTAGAGTCTCAAGCTTGGCGC
GCCCACGTGACTAGTGGCACTGGCCGTCGTTTTACAACGTCGTGACTGGGAAAACCCTGGCG
TTACCCAACTTAATCGCCTTGCAGCACATCCCCCTTTCGCCAGCTGGCGTAATAGCGAAGAG
GCCCGCACCGATCGCCCTTCCCAACAGTTGCGCAGCCTGAATGGCGAATGCTAGAGCAGCTT
GAGCTTGGATCAGATTGTCGTTTCCCGCCTTCAGTTTAAACTATCAGTGTTTGACAGGATAT
ATTGGCGGGTAAACCTAAGAGAAAAGAGCGTTTA
Construct 8591 from 2X35S prom to NOS term
(SEQ ID NO: 36)
GTCAACATGGTGGAGCACGACACACTTGTCTACTCCAAAAATATCAAAGATACAGTCTCAGA
AGACCAAAGGGCAATTGAGACTTTTCAACAAAGGGTAATATCCGGAAACCTCCTCGGATTCC
ATTGCCCAGCTATCTGTCACTTTATTGTGAAGATAGTGGAAAAGGAAGGTGGCTCCTACAAA
TGCCATCATTGCGATAAAGGAAAGGCCATCGTTGAAGATGCCTCTGCCGACAGTGGTCCCAA
AGATGGACCCCCACCCACGAGGAGCATCGTGGAAAAAGAAGACGTTCCAACCACGTCTTCAA
AGCAAGTGGATTGATGTGATAACATGGTGGAGCACGACACACTTGTCTACTCCAAAAATATC
AAAGATACAGTCTCAGAAGACCAAAGGGCAATTGAGACTTTTCAACAAAGGGTAATATCCGG
AAACCTCCTCGGATTCCATTGCCCAGCTATCTGTCACTTTATTGTGAAGATAGTGGAAAAGG
AAGGTGGCTCCTACAAATGCCATCATTGCGATAAAGGAAAGGCCATCGTTGAAGATGCCTCT
GCCGACAGTGGTCCCAAAGATGGACCCCCACCCACGAGGAGCATCGTGGAAAAAGAAGACGT
TCCAACCACGTCTTCAAAGCAAGTGGATTGATGTGATATCTCCACTGACGTAAGGGATGACG
CACAATCCCACTATCCTTCGCAAGACCCTTCCTCTATATAAGGAAGTTCATTTCATTTGGAG
AGGCACTCCATTTGAATCTATCAAACCAAAACACATTGAGCAAAATGGCGAAAAACGTTGCG
ATTTTCGGCTTATTGTTTTCTCTTCTTGTGTTGGTTCCTTCTCAGATCTTCGCGGTGAATCT
TACGACGCGAACACAGTTACCACCCGCATATACAAATAGCTTCACTCGGGGTGTTTATTACC
CCGACAAAGTGTTCAGGTCCTCCGTGCTCCACTCAACACAGGACCTCTTTCTTCCTTTCTTT
TCTAACGTGACATGGTTTCATGCCATTCATGTATCCGGCACTAACGGTACTAAGAGGTTCGA
TAATCCTGTGCTCCCTTTCAATGACGGCGTTTACTTTGCAAGCACAGAGAAGAGTAACATCA
TCCGAGGTTGGATCTTTGGCACTACCCTCGATTCAAAGACGCAGAGCCTCCTCATTGTGAAC
AATGCCACTAACGTGGTGATCAAAGTTTGCGAGTTTCAGTTCTGCAATGACCCTTTCTTGGG
GGTGTACTATCATAAGAACAACAAGTCTTGGATGGAATCTGAATTCCGCGTCTATAGCAGCG
CCAACAACTGCACCTTTGAATACGTGTCCCAGCCCTTCCTTATGGACCTGGAGGGAAAGCAG
GGAAACTTTAAGAATCTGAGAGAGTTCGTGTTTAAAAATATCGACGGCTATTTTAAGATCTA
TTCTAAGCACACGCCTATTAATCTCGTGCGCGATCTTCCACAAGGCTTCAGCGCCCTGGAAC
CACTCGTGGACCTCCCAATTGGTATCAACATCACTAGATTTCAGACTCTGCTTGCCCTCCAC
CGATCCTATCTGACACCCGGAGACTCCTCTAGCGGCTGGACTGCCGGCGCTGCCGCTTATTA
CGTTGGTTATCTTCAGCCACGCACGTTCCTGCTGAAGTATAACGAGAATGGTACTATTACCG
ATGCCGTGGATTGTGCCCTTGACCCCCTGTCCGAAACTAAGTGCACACTCAAGTCATTCACT
GTGGAAAAAGGAATCTACCAGACAAGCAATTTTCGGGTCCAGCCTACTGAGAGCATTGTGCG
CTTTCCTAACATCACAAATCTTTGCCCCTTCGGAGAGGTTTTCAATGCTACACGGTTTGCCT
CCGTGTATGCCTGGAACCGCAAGAGAATTTCCAATTGCGTGGCCGATTACTCCGTGCTCTAC
AATAGTGCAAGCTTTAGCACCTTTAAGTGCTATGGCGTATCCCCTACTAAGCTTAACGACTT
GTGTTTCACAAACGTGTATGCCGACTCCTTTGTGATACGGGGCGACGAAGTTAGACAGATAG
CACCAGGACAGACGGGAAAGATAGCTGACTACAACTATAAGCTTCCTGATGACTTCACTGGC
TGCGTTATCGCGTGGAATTCTAACAACCTGGACTCAAAAGTCGGCGGCAACTATAACTATCT
CTATCGGCTGTTCCGCAAGAGTAACCTTAAGCCCTTTGAGAGAGATATAAGCACTGAAATCT
ACCAGGCTGGCAGTACGCCCTGTAATGGCGTGGAAGGCTTTAATTGTTATTTTCCACTGCAA
TCCTATGGTTTTCAGCCAACCAATGGCGTGGGCTACCAACCATACCGCGTCGTGGTGCTCTC
CTTTGAACTGCTCCACGCTCCCGCGACTGTCTGCGGCCCCAAGAAGTCCACGAACCTTGTGA
AGAATAAGTGCGTTAATTTTAATTTCAACGGCCTCACTGGAACAGGAGTGCTCACTGAGAGT
AACAAGAAGTTCCTGCCATTTCAACAATTTGGCAGAGACATAGCCGATACTACTGACGCCGT
TAGGGACCCCCAGACCCTCGAGATTCTCGATATAACGCCCTGCTCCTTCGGTGGAGTTTCCG
TGATCACGCCAGGCACCAATACCAGTAACCAGGTCGCCGTGCTGTATCAGGATGTCAACTGT
ACTGAGGTGCCCGTAGCCATCCATGCGGATCAGCTCACACCAACTTGGAGGGTGTACAGCAC
CGGCTCCAATGTATTCCAGACTCGGGCCGGATGCCTTATTGGCGCCGAACACGTGAACAATA
GTTACGAATGCGATATTCCAATTGGCGCCGGAATCTGTGCTAGCTACCAGACTCAGACGAAC
TCCCCAGGCAGCGCCAGCAGCGTTGCCAGCCAGTCAATCATCGCTTATACAATGTCACTTGG
AGCCGAAAACTCCGTGGCTTACTCAAACAACAGCATCGCCATCCCCACAAACTTCACCATAT
CCGTGACAACTGAGATTCTGCCAGTGTCCATGACTAAGACGTCCGTAGATTGCACTATGTAC
ATATGCGGCGACAGCACAGAATGTTCTAATCTGCTGCTGCAATATGGAAGCTTCTGCACTCA
ACTGAACAGAGCGCTCACAGGCATCGCCGTGGAGCAGGATAAGAATACCCAGGAGGTGTTCG
CCCAAGTTAAGCAGATCTACAAGACCCCACCCATAAAGGATTTCGGTGGATTCAATTTTAGT
CAGATACTCCCAGACCCATCTAAGCCATCCAAGAGGAGCTTTATCGAGGATCTTTTGTTTAA
CAAAGTTACTCTGGCCGACGCCGGTTTCATCAAGCAGTACGGAGATTGCCTCGGCGACATCG
CTGCTCGTGACCTCATCTGTGCGCAAAAGTTTAACGGTCTGACGGTGCTGCCTCCCCTCCTT
ACTGATGAAATGATCGCCCAGTATACCAGCGCACTCCTCGCTGGCACCATAACATCCGGTTG
GACATTCGGCGCTGGTGCAGCACTGCAGATACCATTCGCCATGCAAATGGCATATCGTTTCA
ACGGTATCGGTGTCACACAGAATGTCCTATATGAGAACCAGAAGCTGATCGCAAATCAGTTC
AATAGTGCCATCGGAAAAATCCAGGATAGCCTTAGCAGCACAGCCTCAGCCCTTGGCAAACT
CCAGGATGTCGTGAACCAGAATGCCCAGGCTCTCAATACCCTCGTGAAGCAGCTCTCATCTA
ATTTCGGCGCAATTTCCAGTGTCCTCAACGACATCCTCAGCCGCCTCGACCCCCCCGAGGCC
GAAGTGCAGATTGACAGACTGATTACAGGTCGACTCCAGAGCCTCCAGACTTACGTGACTCA
GCAGCTGATAAGAGCCGCCGAGATAAGGGCCAGCGCTAACCTGGCTGCCACAAAGATGTCTG
AGTGCGTGCTGGGCCAGTCCAAGAGAGTAGACTTCTGTGGCAAAGGCTACCATCTGATGAGC
TTCCCACAATCCGCACCTCACGGCGTAGTGTTCCTCCACGTGACATATGTACCGGCTCAGGA
GAAGAATTTCACTACCGCTCCTGCTATATGCCATGATGGAAAGGCTCACTTCCCCCGGGAGG
GGGTGTTCGTGTCCAACGGCACCCATTGGTTTGTGACTCAGCGGAATTTCTACGAACCCCAG
ATCATAACCACTGACAACACATTTGTGTCCGGAAATTGTGACGTGGTCATTGGAATAGTGAA
CAACACTGTTTATGATCCACTGCAGCCAGAACTTGACAGCTTTAAGGAGGAGCTCGACAAGT
ACTTCAAGAATCATACGTCACCAGATGTGGACCTCGGAGATATTAGCGGTATCAATGCCAGT
GTTGTCAATATTCAGAAGGAAATAGACCGCCTTAATGAGGTCGCCAAAAATCTGAACGAGAG
CCTCATCGATCTTCAGGAGCTGGGCAAATATGAGCAGTACATCAAGTGGCCTTGGTATATTT
GGCTTGGCTTCATCGCCGGCCTGATCGCCATAGTAATGGTCACAATTATGCTCTGCTGCATG
ACCTCTTGCTGCTCCTGTCTGAAAGGCTGCTGCTCTTGCGGATCCTGCTGCAAATTTGATGA
GGATGACAGTGAACCAGTCCTGAAGGGCGTGAAGCTGCACTATACTTAGAGGCCTTAGTCGT
GTCGTTTTTCAAATAATATAATCCTTTTAGGGTTTTAGTTAGTTTAAATTTTCTGTTGCTCC
TGTTTAGCAGGTCGTGCCTTCAGCAAGCACACAAAAACAGAGTGTTTATTTTAAGTTGTTTG
TTTAGTGATTCAAAAAAAAAATCGTTCAAACATTTGGCAATAAAGTTTCTTAAGATTGAATC
CTGTTGCCGGTCTTGCGATGATTATCATATAATTTCTGTTGAATTACGTTAAGCATGTAATA
ATTAACATGTAATGCATGACGTTATTTATGAGATGGGTTTTTATGATTAGAGTCCCGCAATT
ATACATTTAATACGCGATAGAAAACAAAATATAGCGCGCAAACTAGGATAAATTATCGCGCG
CGGTGTCATCTATGTTACTAGAT
C-Terminal Region of Modified SARS-CoV-2 S protein with H5i Hemagglutinin CT,
Variation 2
(SEQ ID NO: 37)
WYIWLGFIAGLIAIVMVTIMAGLSLWMCSNGSLQCRICI
C-Terminal Region of Modified SARS-CoV-2 S protein with H5i Hemagglutinin CT,
Variation 3
(SEQ ID NO: 38)
WYIWLGFIAGLIAIVMVTIMLCCMCSNGSLQCRICI
C-Terminal Region of Modified SARS-CoV-2 S protein with H5i Hemagglutinin CT,
Variation 4
(SEQ ID NO: 39)
WYIWLGFIAGLIAIVMVTIMLCCSNGSLQCRICI
3′UTR AvB (Arracacha virus B)
(SEQ ID NO: 40)
TAGTCGTGTCGTTTTTCAAATAATATAATCCTTTTAGGGTTTTAGTTAGTTTAAATTTTCTG
TTGCTCCTGTTTAGCAGGTCGTGCCTTCAGCAAGCACACAAAAACAGAGTGTTTATTTTAAG
TTGTTTGTTTAGTGATTCAAAAAAAAA
3′UTR trBNYVV (Beet necrotic yellow vein virus)
(SEQ ID NO: 41)
CCTATCTTGATGAAGGTTGTTGTGGTTTTCTCATTACTGTTTTATTATTGTTTGAGTTGCTT
ATGTCGGTTCTTGATTATGTGGTGCATAATTATTGAACTAATTGTTTGTTGGGTTGTAATGT
ACTGACTGGGTGTGAATTGTACCAGTCGTTAAAGGGTTTACTATCAGTATATTGATAT
3′ UTR SBMV (Southern bean mosaic virus)
(SEQ ID NO: 42)
TGAGGAGTTGTATAATAATACCTGCACCCTTCTCTTTGGCAGGGAGGGTGTTTCGTTTTCAC
AATGCCACGCGCTTGAGGGAGAATGCACGTTAATCATCCCTCCGCTAGTGATGGAGCGTAAT
CCAAAAGT
3′ UTR TuRSV (Turnip ringspot virus)
(SEQ ID NO: 43)
TGATTTATAATAGCCATAGATTAAGTTTAAATGTATTACGTTTGTATTTTATTCTCTTTTTT
AAGTTTCCTATGTTGTTTTAAATTAAATATCTGTATAATTAGTAGATGTAAATCTGCTTTGT
GCGTTTGACAGTCTGTGGAAACGCACTGGTTCATGAGATAGGACCACCTAGGAGGTAGGACT
CTGGGTTTTAATTATCTCATTTCTTAGTTATACCGTATTATATATATGATTTAGTAGTAATT
GTTTTCTCTTGATATGTATTATTACTTTTTTATT
3′ UTR CPMV (Cowpea Mosaic virus)
(SEQ ID NO: 44)
ATTTTCTTTAGTTTGAATTTACTGTTATTCGGTGTGCATTTCTATGTTTGGTGAGCGGTTTT
CTGTGCTCAGAGTGTGTTTATTTTATGTAATTTAATTTCTTTGTGAGCTCCTGTTTAGCAGG
TCGTCCCTTCAGCAAGGACACAAAAAGATTTTAATTTTATT
3′ UTR BBTMV (Broad bean true mosaic virus)
(SEQ ID NO: 45)
TAGTTTTCTTCCGCTTTTCTTTTGTAGTGTGTGGTTTTCTTTGTTTCTTCTTTTCTTTTCTC
TTTCCTTTTCTCTTACTCCTGCCTGGCAGGTCGTGCCTTCAGTAAGCACAACAAAAATATGC
ATTTATTAGAGTATTTCTTTCTTCTTTAGCATAAAGGTATTGAAGACCTATAAACTTCGTCC
GGGTTGGGGAAAGTACCAGCTTAGCATATCTTTAGAAAACTATATAGAGCTCTTTACCTTGA
GTTGTTTCCTAAAGTTTATGCAAAAAA
3′ UTR trOUMV (Ourmia melon virus)
(SEQ ID NO: 46)
CTCACGTCTGGGGTGAGCCCTAGCCAAATAGGAAAACGATAAGCGCTTTGCATGCAAAATGA
GTTGGGCCACAAGTGCCACTCGCAGCGAAGGCGGTCTGAGGTTTCCCCCTGGCGGTTACTTC
CATATCTTTGGGAGATAACTGGG
(PDI) Modified SARS-CoV-2 S protein GSAS + PP with H5i Hemagglutinin CT AA
(SEQ ID NO: 47)
MAKNVAIFGLLFSLLVLVPSQIFAVNLTTRTQLPPAYTNSFTRGVYYPDKVFRSSVLHSTQD
LFLPFFSNVTWFHAIHVSGTNGTKRFDNPVLPFNDGVYFASTEKSNIIRGWIFGTTLDSKTQ
SLLIVNNATNVVIKVCEFQFCNDPFLGVYYHKNNKSWMESEFRVYSSANNCTFEYVSQPFLM
DLEGKQGNFKNLREFVFKNIDGYFKIYSKHTPINLVRDLPQGFSALEPLVDLPIGINITRFQ
TLLALHRSYLTPGDSSSGWTAGAAAYYVGYLQPRTFLLKYNENGTITDAVDCALDPLSETKC
TLKSFTVEKGIYQTSNFRVQPTESIVRFPNITNLCPFGEVFNATRFASVYAWNRKRISNCVA
DYSVLYNSASFSTFKCYGVSPTKLNDLCFTNVYADSFVIRGDEVRQIAPGQTGKIADYNYKL
PDDFTGCVIAWNSNNLDSKVGGNYNYLYRLFRKSNLKPFERDISTEIYQAGSTPCNGVEGFN
CYFPLQSYGFQPTNGVGYQPYRVVVLSFELLHAPATVCGPKKSTNLVKNKCVNFNFNGLTGT
GVLTESNKKFLPFQQFGRDIADTTDAVRDPQTLEILDITPCSFGGVSVITPGTNTSNQVAVL
YQDVNCTEVPVAIHADQLTPTWRVYSTGSNVFQTRAGCLIGAEHVNNSYECDIPIGAGICAS
YQTQTNSPGSASSVASQSIIAYTMSLGAENSVAYSNNSIAIPTNFTISVTTEILPVSMTKTS
VDCTMYICGDSTECSNLLLQYGSFCTQLNRALTGIAVEQDKNTQEVFAQVKQIYKTPPIKDF
GGFNFSQILPDPSKPSKRSFIEDLLFNKVTLADAGFIKQYGDCLGDIAARDLICAQKFNGLT
VLPPLLTDEMIAQYTSALLAGTITSGWTFGAGAALQIPFAMQMAYRFNGIGVTQNVLYENQK
LIANQFNSAIGKIQDSLSSTASALGKLQDVVNQNAQALNTLVKQLSSNFGAISSVLNDILSR
LDPPEAEVQIDRLITGRLQSLQTYVTQQLIRAAEIRASANLAATKMSECVLGQSKRVDFCGK
GYHLMSFPQSAPHGVVFLHVTYVPAQEKNFTTAPAICHDGKAHFPREGVFVSNGTHWFVTQR
NFYEPQIITTDNTFVSGNCDVVIGIVNNTVYDPLQPELDSFKEELDKYFKNHTSPDVDLGDI
SGINASVVNIQKEIDRLNEVAKNLNESLIDLQELGKYEQYIKWPWYIWLGFIAGLIAIVMVT
IMLSLWMCSNGSLQCRICI
(PDI) Modified SARS-CoV-2 S protein GSAS + 4P with H5i Hemagglutinin CT AA
(SEQ ID NO: 48)
MAKNVAIFGLLFSLLVLVPSQIFAVNLTTRTQLPPAYTNSFTRGVYYPDKVFRSSVLHSTQD
LFLPFFSNVTWFHAIHVSGTNGTKRFDNPVLPFNDGVYFASTEKSNIIRGWIFGTTLDSKTQ
SLLIVNNATNVVIKVCEFQFCNDPFLGVYYHKNNKSWMESEFRVYSSANNCTFEYVSQPFLM
DLEGKQGNFKNLREFVFKNIDGYFKIYSKHTPINLVRDLPQGFSALEPLVDLPIGINITRFQ
TLLALHRSYLTPGDSSSGWTAGAAAYYVGYLQPRTFLLKYNENGTITDAVDCALDPLSETKC
TLKSFTVEKGIYQTSNFRVQPTESIVRFPNITNLCPFGEVFNATRFASVYAWNRKRISNCVA
DYSVLYNSASFSTFKCYGVSPTKLNDLCFTNVYADSFVIRGDEVRQIAPGQTGKIADYNYKL
PDDFTGCVIAWNSNNLDSKVGGNYNYLYRLFRKSNLKPFERDISTEIYQAGSTPCNGVEGFN
CYFPLQSYGFQPTNGVGYQPYRVVVLSFELLHAPATVCGPKKSTNLVKNKCVNFNFNGLTGT
GVLTESNKKFLPFQQFGRDIADTTDAVRDPQTLEILDITPCSFGGVSVITPGTNTSNQVAVL
YQDVNCTEVPVAIHADQLTPTWRVYSTGSNVFQTRAGCLIGAEHVNNSYECDIPIGAGICAS
YQTQTNSPGSASSVASQSIIAYTMSLGAENSVAYSNNSIAIPTNFTISVTTEILPVSMTKTS
VDCTMYICGDSTECSNLLLQYGSFCTQLNRALTGIAVEQDKNTQEVFAQVKQIYKTPPIKDF
GGFNFSQILPDPSKPSKRSPIEDLLFNKVTLADAGFIKQYGDCLGDIAARDLICAQKFNGLT
VLPPLLTDEMIAQYTSALLAGTITSGWTFGAGAALQIPFAMQMAYRFNGIGVTQNVLYENQK
LIANQFNSAIGKIQDSLSSTPSALGKLQDVVNQNAQALNTLVKQLSSNFGAISSVLNDILSR
LDPPEAEVQIDRLITGRLQSLQTYVTQQLIRAAEIRASANLAATKMSECVLGQSKRVDFCGK
GYHLMSFPQSAPHGVVFLHVTYVPAQEKNFTTAPAICHDGKAHFPREGVFVSNGTHWFVTQR
NFYEPQIITTDNTFVSGNCDVVIGIVNNTVYDPLQPELDSFKEELDKYFKNHTSPDVDLGDI
SGINASVVNIQKEIDRLNEVAKNLNESLIDLQELGKYEQYIKWPWYIWLGFIAGLIAIVMVT
IMLSLWMCSNGSLQCRICI
(PDI) Modified SARS-CoV-2 S protein GSAS + 6P with H5i Hemagglutinin CT AA
(SEQ ID NO: 49)
MAKNVAIFGLLFSLLVLVPSQIFAVNLTTRTQLPPAYTNSFTRGVYYPDKVFRSSVLHSTQD
LFLPFFSNVTWFHAIHVSGTNGTKRFDNPVLPFNDGVYFASTEKSNIIRGWIFGTTLDSKTQ
SLLIVNNATNVVIKVCEFQFCNDPFLGVYYHKNNKSWMESEFRVYSSANNCTFEYVSQPFLM
DLEGKQGNFKNLREFVFKNIDGYFKIYSKHTPINLVRDLPQGFSALEPLVDLPIGINITRFQ
TLLALHRSYLTPGDSSSGWTAGAAAYYVGYLQPRTFLLKYNENGTITDAVDCALDPLSETKC
TLKSFTVEKGIYQTSNFRVQPTESIVRFPNITNLCPFGEVFNATRFASVYAWNRKRISNCVA
DYSVLYNSASFSTFKCYGVSPTKLNDLCFTNVYADSFVIRGDEVRQIAPGQTGKIADYNYKL
PDDFTGCVIAWNSNNLDSKVGGNYNYLYRLFRKSNLKPFERDISTEIYQAGSTPCNGVEGFN
CYFPLQSYGFQPTNGVGYQPYRVVVLSFELLHAPATVCGPKKSTNLVKNKCVNFNFNGLTGT
GVLTESNKKFLPFQQFGRDIADTTDAVRDPQTLEILDITPCSFGGVSVITPGTNTSNQVAVL
YQDVNCTEVPVAIHADQLTPTWRVYSTGSNVFQTRAGCLIGAEHVNNSYECDIPIGAGICAS
YQTQTNSPGSASSVASQSIIAYTMSLGAENSVAYSNNSIAIPTNFTISVTTEILPVSMTKTS
VDCTMYICGDSTECSNLLLQYGSFCTQLNRALTGIAVEQDKNTQEVFAQVKQIYKTPPIKDF
GGFNFSQILPDPSKPSKRSPIEDLLFNKVTLADAGFIKQYGDCLGDIAARDLICAQKFNGLT
VLPPLLTDEMIAQYTSALLAGTITSGWTFGAGPALQIPFPMQMAYRENGIGVTQNVLYENQK
LIANQFNSAIGKIQDSLSSTPSALGKLQDVVNQNAQALNTLVKQLSSNFGAISSVLNDILSR
LDPPEAEVQIDRLITGRLQSLQTYVTQQLIRAAEIRASANLAATKMSECVLGQSKRVDFCGK
GYHLMSFPQSAPHGVVFLHVTYVPAQEKNFTTAPAICHDGKAHFPREGVFVSNGTHWFVTQR
NFYEPQIITTDNTFVSGNCDVVIGIVNNTVYDPLQPELDSFKEELDKYFKNHTSPDVDLGDI
SGINASVVNIQKEIDRLNEVAKNLNESLIDLQELGKYEQYIKWPWYIWLGFIAGLIAIVMVT
IMLSLWMCSNGSLQCRICI
(PDI) Modified SARS-CoV-2 S protein GSAS + PP + 923 with H5i Hemagglutinin CT AA
(SEQ ID NO: 50)
MAKNVAIFGLLFSLLVLVPSQIFAVNLTTRTQLPPAYTNSFTRGVYYPDKVFRSSVLHSTQD
LFLPFFSNVTWFHAIHVSGTNGTKRFDNPVLPFNDGVYFASTEKSNIIRGWIFGTTLDSKTQ
SLLIVNNATNVVIKVCEFQFCNDPFLGVYYHKNNKSWMESEFRVYSSANNCTFEYVSQPFLM
DLEGKQGNFKNLREFVFKNIDGYFKIYSKHTPINLVRDLPQGFSALEPLVDLPIGINITRFQ
TLLALHRSYLTPGDSSSGWTAGAAAYYVGYLQPRTFLLKYNENGTITDAVDCALDPLSETKC
TLKSFTVEKGIYQTSNFRVQPTESIVRFPNITNLCPFGEVFNATRFASVYAWNRKRISNCVA
DYSVLYNSASFSTFKCYGVSPTKLNDLCFTNVYADSFVIRGDEVRQIAPGQTGKIADYNYKL
PDDFTGCVIAWNSNNLDSKVGGNYNYLYRLFRKSNLKPFERDISTEIYQAGSTPCNGVEGFN
CYFPLQSYGFQPTNGVGYQPYRVVVLSFELLHAPATVCGPKKSTNLVKNKCVNFNFNGLTGT
GVLTESNKKFLPFQQFGRDIADTTDAVRDPQTLEILDITPCSFGGVSVITPGTNTSNQVAVL
YQDVNCTEVPVAIHADQLTPTWRVYSTGSNVFQTRAGCLIGAEHVNNSYECDIPIGAGICAS
YQTQTNSPGSASSVASQSIIAYTMSLGAENSVAYSNNSIAIPTNFTISVTTEILPVSMTKTS
VDCTMYICGDSTECSNLLLQYGSFCTQLNRALTGIAVEQDKNTQEVFAQVKQIYKTPPIKDF
GGFNFSQILPDPSKPSKRSFIEDLLFNKVTLADAGFIKQYGDCLGDIAARDLICAQKFNGLT
VLPPLLTDEMIAQYTSALLAGTITSGWTFGAGAALQIPFAMQMAYRFNGIGVTQNVLYENQK
LIANQFNSAIGKIQDSFSSTASALGKLQDVVNQNAQALNTLVKQLSSNFGAISSVLNDILSR
LDPPEAEVQIDRLITGRLQSLQTYVTQQLIRAAEIRASANLAATKMSECVLGQSKRVDFCGK
GYHLMSFPQSAPHGVVFLHVTYVPAQEKNFTTAPAICHDGKAHFPREGVFVSNGTHWFVTQR
NFYEPQIITTDNTFVSGNCDVVIGIVNNTVYDPLQPELDSFKEELDKYFKNHTSPDVDLGDI
SGINASVVNIQKEIDRLNEVAKNLNESLIDLQELGKYEQYIKWPWYIWLGFIAGLIAIVMVT
IMLSLWMCSNGSLQCRICI
(PDI) Modified SARS-CoV-2 S protein GSAS + 4P + 923 with H5i Hemagglutinin CT AA
(SEQ ID NO: 51)
MAKNVAIFGLLFSLLVLVPSQIFAVNLTTRTQLPPAYTNSFTRGVYYPDKVFRSSVLHSTQD
LFLPFFSNVTWFHAIHVSGTNGTKRFDNPVLPFNDGVYFASTEKSNIIRGWIFGTTLDSKTQ
SLLIVNNATNVVIKVCEFQFCNDPFLGVYYHKNNKSWMESEFRVYSSANNCTFEYVSQPFLM
DLEGKQGNFKNLREFVFKNIDGYFKIYSKHTPINLVRDLPQGFSALEPLVDLPIGINITRFQ
TLLALHRSYLTPGDSSSGWTAGAAAYYVGYLQPRTFLLKYNENGTITDAVDCALDPLSETKC
TLKSFTVEKGIYQTSNFRVQPTESIVRFPNITNLCPFGEVFNATRFASVYAWNRKRISNCVA
DYSVLYNSASFSTFKCYGVSPTKLNDLCFTNVYADSFVIRGDEVRQIAPGQTGKIADYNYKL
PDDFTGCVIAWNSNNLDSKVGGNYNYLYRLFRKSNLKPFERDISTEIYQAGSTPCNGVEGFN
CYFPLQSYGFQPTNGVGYQPYRVVVLSFELLHAPATVCGPKKSTNLVKNKCVNFNFNGLTGT
GVLTESNKKFLPFQQFGRDIADTTDAVRDPQTLEILDITPCSFGGVSVITPGTNTSNQVAVL
YQDVNCTEVPVAIHADQLTPTWRVYSTGSNVFQTRAGCLIGAEHVNNSYECDIPIGAGICAS
YQTQTNSPGSASSVASQSIIAYTMSLGAENSVAYSNNSIAIPTNFTISVTTEILPVSMTKTS
VDCTMYICGDSTECSNLLLQYGSFCTQLNRALTGIAVEQDKNTQEVFAQVKQIYKTPPIKDF
GGFNFSQILPDPSKPSKRSPIEDLLFNKVTLADAGFIKQYGDCLGDIAARDLICAQKFNGLT
VLPPLLTDEMIAQYTSALLAGTITSGWTFGAGAALQIPFAMQMAYRFNGIGVTQNVLYENQK
LIANQFNSAIGKIQDSFSSTPSALGKLQDVVNQNAQALNTLVKQLSSNFGAISSVLNDILSR
LDPPEAEVQIDRLITGRLQSLQTYVTQQLIRAAEIRASANLAATKMSECVLGQSKRVDFCGK
GYHLMSFPQSAPHGVVFLHVTYVPAQEKNFTTAPAICHDGKAHFPREGVFVSNGTHWFVTQR
NFYEPQIITTDNTFVSGNCDVVIGIVNNTVYDPLQPELDSFKEELDKYFKNHTSPDVDLGDI
SGINASVVNIQKEIDRLNEVAKNLNESLIDLQELGKYEQYIKWPWYIWLGFIAGLIAIVMVT
IMLSLWMCSNGSLQCRICI
(PDI) Modified SARS-CoV-2 S protein GSAS + 6P + 923 with H5i Hemagglutinin CT AA
(SEQ ID NO: 52)
MAKNVAIFGLLFSLLVLVPSQIFAVNLTTRTQLPPAYTNSFTRGVYYPDKVFRSSVLHSTQD
LFLPFFSNVTWFHAIHVSGTNGTKRFDNPVLPFNDGVYFASTEKSNIIRGWIFGTTLDSKTQ
SLLIVNNATNVVIKVCEFQFCNDPFLGVYYHKNNKSWMESEFRVYSSANNCTFEYVSQPFLM
DLEGKQGNFKNLREFVFKNIDGYFKIYSKHTPINLVRDLPQGFSALEPLVDLPIGINITRFQ
TLLALHRSYLTPGDSSSGWTAGAAAYYVGYLQPRTFLLKYNENGTITDAVDCALDPLSETKC
TLKSFTVEKGIYQTSNFRVQPTESIVRFPNITNLCPFGEVFNATRFASVYAWNRKRISNCVA
DYSVLYNSASFSTFKCYGVSPTKLNDLCFTNVYADSFVIRGDEVRQIAPGQTGKIADYNYKL
PDDFTGCVIAWNSNNLDSKVGGNYNYLYRLFRKSNLKPFERDISTEIYQAGSTPCNGVEGFN
CYFPLQSYGFQPTNGVGYQPYRVVVLSFELLHAPATVCGPKKSTNLVKNKCVNFNFNGLTGT
GVLTESNKKFLPFQQFGRDIADTTDAVRDPQTLEILDITPCSFGGVSVITPGTNTSNQVAVL
YQDVNCTEVPVAIHADQLTPTWRVYSTGSNVFQTRAGCLIGAEHVNNSYECDIPIGAGICAS
YQTQTNSPGSASSVASQSIIAYTMSLGAENSVAYSNNSIAIPTNFTISVTTEILPVSMTKTS
VDCTMYICGDSTECSNLLLQYGSFCTQLNRALTGIAVEQDKNTQEVFAQVKQIYKTPPIKDF
GGFNFSQILPDPSKPSKRSPIEDLLFNKVTLADAGFIKQYGDCLGDIAARDLICAQKFNGLT
VLPPLLTDEMIAQYTSALLAGTITSGWTFGAGPALQIPFPMQMAYRFNGIGVTQNVLYENQK
LIANQFNSAIGKIQDSFSSTPSALGKLQDVVNQNAQALNTLVKQLSSNFGAISSVLNDILSR
LDPPEAEVQIDRLITGRLQSLQTYVTQQLIRAAEIRASANLAATKMSECVLGQSKRVDFCGK
GYHLMSFPQSAPHGVVFLHVTYVPAQEKNFTTAPAICHDGKAHFPREGVFVSNGTHWFVTQR
NFYEPQIITTDNTFVSGNCDVVIGIVNNTVYDPLQPELDSFKEELDKYFKNHTSPDVDLGDI
SGINASVVNIQKEIDRLNEVAKNLNESLIDLQELGKYEQYIKWPWYIWLGFIAGLIAIVMVT
IMLSLWMCSNGSLQCRICI
(PDI) Modified SARS-CoV-2 S protein GSAS + PP with H1 Cal Hemagglutinin CT AA
(SEQ ID NO: 53)
MAKNVAIFGLLFSLLVLVPSQIFAVNLTTRTQLPPAYTNSFTRGVYYPDKVFRSSVLHSTQD
LFLPFFSNVTWFHAIHVSGTNGTKRFDNPVLPFNDGVYFASTEKSNIIRGWIFGTTLDSKTQ
SLLIVNNATNVVIKVCEFQFCNDPFLGVYYHKNNKSWMESEFRVYSSANNCTFEYVSQPFLM
DLEGKQGNFKNLREFVFKNIDGYFKIYSKHTPINLVRDLPQGFSALEPLVDLPIGINITRFQ
TLLALHRSYLTPGDSSSGWTAGAAAYYVGYLQPRTFLLKYNENGTITDAVDCALDPLSETKC
TLKSFTVEKGIYQTSNFRVQPTESIVRFPNITNLCPFGEVFNATRFASVYAWNRKRISNCVA
DYSVLYNSASFSTFKCYGVSPTKLNDLCFTNVYADSFVIRGDEVRQIAPGQTGKIADYNYKL
PDDFTGCVIAWNSNNLDSKVGGNYNYLYRLFRKSNLKPFERDISTEIYQAGSTPCNGVEGFN
CYFPLQSYGFQPTNGVGYQPYRVVVLSFELLHAPATVCGPKKSTNLVKNKCVNFNFNGLTGT
GVLTESNKKFLPFQQFGRDIADTTDAVRDPQTLEILDITPCSFGGVSVITPGTNTSNQVAVL
YQDVNCTEVPVAIHADQLTPTWRVYSTGSNVFQTRAGCLIGAEHVNNSYECDIPIGAGICAS
YQTQTNSPGSASSVASQSIIAYTMSLGAENSVAYSNNSIAIPTNFTISVTTEILPVSMTKTS
VDCTMYICGDSTECSNLLLQYGSFCTQLNRALTGIAVEQDKNTQEVFAQVKQIYKTPPIKDF
GGFNFSQILPDPSKPSKRSFIEDLLFNKVTLADAGFIKQYGDCLGDIAARDLICAQKFNGLT
VLPPLLTDEMIAQYTSALLAGTITSGWTFGAGAALQIPFAMQMAYRFNGIGVTQNVLYENQK
LIANQFNSAIGKIQDSLSSTASALGKLQDVVNQNAQALNTLVKQLSSNFGAISSVLNDILSR
LDPPEAEVQIDRLITGRLQSLQTYVTQQLIRAAEIRASANLAATKMSECVLGQSKRVDFCGK
GYHLMSFPQSAPHGVVFLHVTYVPAQEKNFTTAPAICHDGKAHFPREGVFVSNGTHWFVTQR
NFYEPQIITTDNTFVSGNCDVVIGIVNNTVYDPLQPELDSFKEELDKYFKNHTSPDVDLGDI
SGINASVVNIQKEIDRLNEVAKNLNESLIDLQELGKYEQYIKWPWYIWLGFIAGLIAIVMVT
IMLSFWMCSNGSLQCRICI
(PDI) Modified SARS-CoV-2 S protein GSAS + PP with H3 Minn Hemagglutinin CT AA
(SEQ ID NO: 54)
MAKNVAIFGLLFSLLVLVPSQIFAVNLTTRTQLPPAYTNSFTRGVYYPDKVFRSSVLHSTQD
LFLPFFSNVTWFHAIHVSGTNGTKRFDNPVLPFNDGVYFASTEKSNIIRGWIFGTTLDSKTQ
SLLIVNNATNVVIKVCEFQFCNDPFLGVYYHKNNKSWMESEFRVYSSANNCTFEYVSQPFLM
DLEGKQGNFKNLREFVFKNIDGYFKIYSKHTPINLVRDLPQGFSALEPLVDLPIGINITRFQ
TLLALHRSYLTPGDSSSGWTAGAAAYYVGYLQPRTFLLKYNENGTITDAVDCALDPLSETKC
TLKSFTVEKGIYQTSNFRVQPTESIVRFPNITNLCPFGEVFNATRFASVYAWNRKRISNCVA
DYSVLYNSASFSTFKCYGVSPTKLNDLCFTNVYADSFVIRGDEVRQIAPGQTGKIADYNYKL
PDDFTGCVIAWNSNNLDSKVGGNYNYLYRLFRKSNLKPFERDISTEIYQAGSTPCNGVEGFN
CYFPLQSYGFQPTNGVGYQPYRVVVLSFELLHAPATVCGPKKSTNLVKNKCVNFNFNGLTGT
GVLTESNKKFLPFQQFGRDIADTTDAVRDPQTLEILDITPCSFGGVSVITPGTNTSNQVAVL
YQDVNCTEVPVAIHADQLTPTWRVYSTGSNVFQTRAGCLIGAEHVNNSYECDIPIGAGICAS
YQTQTNSPGSASSVASQSIIAYTMSLGAENSVAYSNNSIAIPTNFTISVTTEILPVSMTKTS
VDCTMYICGDSTECSNLLLQYGSFCTQLNRALTGIAVEQDKNTQEVFAQVKQIYKTPPIKDF
GGFNFSQILPDPSKPSKRSFIEDLLFNKVTLADAGFIKQYGDCLGDIAARDLICAQKFNGLT
VLPPLLTDEMIAQYTSALLAGTITSGWTFGAGAALQIPFAMQMAYRFNGIGVTQNVLYENQK
LIANQFNSAIGKIQDSLSSTASALGKLQDVVNQNAQALNTLVKQLSSNFGAISSVLNDILSR
LDPPEAEVQIDRLITGRLQSLQTYVTQQLIRAAEIRASANLAATKMSECVLGQSKRVDFCGK
GYHLMSFPQSAPHGVVFLHVTYVPAQEKNFTTAPAICHDGKAHFPREGVFVSNGTHWFVTQR
NFYEPQIITTDNTFVSGNCDVVIGIVNNTVYDPLQPELDSFKEELDKYFKNHTSPDVDLGDI
SGINASVVNIQKEIDRLNEVAKNLNESLIDLQELGKYEQYIKWPWYIWLGFIAGLIAIVMVT
IMLMWACQKGNIRCNICI
(PDI) Modified SARS-CoV-2 S protein GSAS + PP with H6 HK Hemagglutinin CT AA
(SEQ ID NO: 55)
MAKNVAIFGLLFSLLVLVPSQIFAVNLTTRTQLPPAYTNSFTRGVYYPDKVFRSSVLHSTQD
LFLPFFSNVTWFHAIHVSGTNGTKRFDNPVLPFNDGVYFASTEKSNIIRGWIFGTTLDSKTQ
SLLIVNNATNVVIKVCEFQFCNDPFLGVYYHKNNKSWMESEFRVYSSANNCTFEYVSQPFLM
DLEGKQGNFKNLREFVFKNIDGYFKIYSKHTPINLVRDLPQGFSALEPLVDLPIGINITRFQ
TLLALHRSYLTPGDSSSGWTAGAAAYYVGYLQPRTFLLKYNENGTITDAVDCALDPLSETKC
TLKSFTVEKGIYQTSNFRVQPTESIVRFPNITNLCPFGEVFNATRFASVYAWNRKRISNCVA
DYSVLYNSASFSTFKCYGVSPTKLNDLCFTNVYADSFVIRGDEVRQIAPGQTGKIADYNYKL
PDDFTGCVIAWNSNNLDSKVGGNYNYLYRLFRKSNLKPFERDISTEIYQAGSTPCNGVEGFN
CYFPLQSYGFQPTNGVGYQPYRVVVLSFELLHAPATVCGPKKSTNLVKNKCVNFNFNGLTGT
GVLTESNKKFLPFQQFGRDIADTTDAVRDPQTLEILDITPCSFGGVSVITPGTNTSNQVAVL
YQDVNCTEVPVAIHADQLTPTWRVYSTGSNVFQTRAGCLIGAEHVNNSYECDIPIGAGICAS
YQTQTNSPGSASSVASQSIIAYTMSLGAENSVAYSNNSIAIPTNFTISVTTEILPVSMTKTS
VDCTMYICGDSTECSNLLLQYGSFCTQLNRALTGIAVEQDKNTQEVFAQVKQIYKTPPIKDF
GGFNFSQILPDPSKPSKRSFIEDLLFNKVTLADAGFIKQYGDCLGDIAARDLICAQKFNGLT
VLPPLLTDEMIAQYTSALLAGTITSGWTFGAGAALQIPFAMQMAYRFNGIGVTQNVLYENQK
LIANQFNSAIGKIQDSLSSTASALGKLQDVVNQNAQALNTLVKQLSSNFGAISSVLNDILSR
LDPPEAEVQIDRLITGRLQSLQTYVTQQLIRAAEIRASANLAATKMSECVLGQSKRVDFCGK
GYHLMSFPQSAPHGVVFLHVTYVPAQEKNFTTAPAICHDGKAHFPREGVFVSNGTHWFVTQR
NFYEPQIITTDNTFVSGNCDVVIGIVNNTVYDPLQPELDSFKEELDKYFKNHTSPDVDLGDI
SGINASVVNIQKEIDRLNEVAKNLNESLIDLQELGKYEQYIKWPWYIWLGFIAGLIAIVMVT
IMLGLWMCSNGSMQCRICI
(PDI) Modified SARS-CoV-2 S protein GSAS + PP with H7 Guangdong Hemagglutinin CT
AA
(SEQ ID NO: 56)
MAKNVAIFGLLFSLLVLVPSQIFAVNLTTRTQLPPAYTNSFTRGVYYPDKVFRSSVLHSTQD
LFLPFFSNVTWFHAIHVSGTNGTKRFDNPVLPFNDGVYFASTEKSNIIRGWIFGTTLDSKTQ
SLLIVNNATNVVIKVCEFQFCNDPFLGVYYHKNNKSWMESEFRVYSSANNCTFEYVSQPFLM
DLEGKQGNFKNLREFVFKNIDGYFKIYSKHTPINLVRDLPQGFSALEPLVDLPIGINITRFQ
TLLALHRSYLTPGDSSSGWTAGAAAYYVGYLQPRTFLLKYNENGTITDAVDCALDPLSETKC
TLKSFTVEKGIYQTSNFRVQPTESIVRFPNITNLCPFGEVFNATRFASVYAWNRKRISNCVA
DYSVLYNSASFSTFKCYGVSPTKLNDLCFTNVYADSFVIRGDEVRQIAPGQTGKIADYNYKL
PDDFTGCVIAWNSNNLDSKVGGNYNYLYRLFRKSNLKPFERDISTEIYQAGSTPCNGVEGFN
CYFPLQSYGFQPTNGVGYQPYRVVVLSFELLHAPATVCGPKKSTNLVKNKCVNFNFNGLTGT
GVLTESNKKFLPFQQFGRDIADTTDAVRDPQTLEILDITPCSFGGVSVITPGTNTSNQVAVL
YQDVNCTEVPVAIHADQLTPTWRVYSTGSNVFQTRAGCLIGAEHVNNSYECDIPIGAGICAS
YQTQTNSPGSASSVASQSIIAYTMSLGAENSVAYSNNSIAIPTNFTISVTTEILPVSMTKTS
VDCTMYICGDSTECSNLLLQYGSFCTQLNRALTGIAVEQDKNTQEVFAQVKQIYKTPPIKDF
GGFNFSQILPDPSKPSKRSFIEDLLFNKVTLADAGFIKQYGDCLGDIAARDLICAQKFNGLT
VLPPLLTDEMIAQYTSALLAGTITSGWTFGAGAALQIPFAMQMAYRFNGIGVTQNVLYENQK
LIANQFNSAIGKIQDSLSSTASALGKLQDVVNQNAQALNTLVKQLSSNFGAISSVLNDILSR
LDPPEAEVQIDRLITGRLQSLQTYVTQQLIRAAEIRASANLAATKMSECVLGQSKRVDFCGK
GYHLMSFPQSAPHGVVFLHVTYVPAQEKNFTTAPAICHDGKAHFPREGVFVSNGTHWFVTQR
NFYEPQIITTDNTFVSGNCDVVIGIVNNTVYDPLQPELDSFKEELDKYFKNHTSPDVDLGDI
SGINASVVNIQKEIDRLNEVAKNLNESLIDLQELGKYEQYIKWPWYIWLGFIAGLIAIVMVT
IMLVFICVKNGNMRCTICI
(PDI) Modified SARS-CoV-2 S protein GSAS + PP with H9 HK Hemagglutinin CT AA
(SEQ ID NO: 57)
MAKNVAIFGLLFSLLVLVPSQIFAVNLTTRTQLPPAYTNSFTRGVYYPDKVFRSSVLHSTQD
LFLPFFSNVTWFHAIHVSGTNGTKRFDNPVLPFNDGVYFASTEKSNIIRGWIFGTTLDSKTQ
SLLIVNNATNVVIKVCEFQFCNDPFLGVYYHKNNKSWMESEFRVYSSANNCTFEYVSQPFLM
DLEGKQGNFKNLREFVFKNIDGYFKIYSKHTPINLVRDLPQGFSALEPLVDLPIGINITRFQ
TLLALHRSYLTPGDSSSGWTAGAAAYYVGYLQPRTFLLKYNENGTITDAVDCALDPLSETKC
TLKSFTVEKGIYQTSNFRVQPTESIVRFPNITNLCPFGEVFNATRFASVYAWNRKRISNCVA
DYSVLYNSASFSTFKCYGVSPTKLNDLCFTNVYADSFVIRGDEVRQIAPGQTGKIADYNYKL
PDDFTGCVIAWNSNNLDSKVGGNYNYLYRLFRKSNLKPFERDISTEIYQAGSTPCNGVEGFN
CYFPLQSYGFQPTNGVGYQPYRVVVLSFELLHAPATVCGPKKSTNLVKNKCVNFNFNGLTGT
GVLTESNKKFLPFQQFGRDIADTTDAVRDPOTLEILDITPCSFGGVSVITPGTNTSNQVAVL
YQDVNCTEVPVAIHADQLTPTWRVYSTGSNVFQTRAGCLIGAEHVNNSYECDIPIGAGICAS
YQTQTNSPGSASSVASQSIIAYTMSLGAENSVAYSNNSIAIPTNFTISVTTEILPVSMTKTS
VDCTMYICGDSTECSNLLLQYGSFCTQLNRALTGIAVEQDKNTQEVFAQVKQIYKTPPIKDF
GGFNFSQILPDPSKPSKRSFIEDLLFNKVTLADAGFIKQYGDCLGDIAARDLICAQKFNGLT
VLPPLLTDEMIAQYTSALLAGTITSGWTFGAGAALQIPFAMQMAYRFNGIGVTQNVLYENQK
LIANQFNSAIGKIQDSLSSTASALGKLQDVVNQNAQALNTLVKQLSSNFGAISSVLNDILSR
LDPPEAEVQIDRLITGRLQSLQTYVTQQLIRAAEIRASANLAATKMSECVLGQSKRVDFCGK
GYHLMSFPQSAPHGVVFLHVTYVPAQEKNFTTAPAICHDGKAHFPREGVFVSNGTHWFVTQR
NFYEPQIITTDNTFVSGNCDVVIGIVNNTVYDPLQPELDSFKEELDKYFKNHTSPDVDLGDI
SGINASVVNIQKEIDRLNEVAKNLNESLIDLQELGKYEQYIKWPWYIWLGFIAGLIAIVMVT
IMLLFWAMSNGSCRCNICI
(PDI) Modified SARS-CoV-2 S protein GSAS + PP with B/Wash Hemagglutinin CT AA
(SEQ ID NO: 58)
MAKNVAIFGLLFSLLVLVPSQIFAVNLTTRTQLPPAYTNSFTRGVYYPDKVFRSSVLHSTQD
LFLPFFSNVTWFHAIHVSGTNGTKRFDNPVLPFNDGVYFASTEKSNIIRGWIFGTTLDSKTQ
SLLIVNNATNVVIKVCEFQFCNDPFLGVYYHKNNKSWMESEFRVYSSANNCTFEYVSQPFLM
DLEGKQGNFKNLREFVFKNIDGYFKIYSKHTPINLVRDLPQGFSALEPLVDLPIGINITRFQ
TLLALHRSYLTPGDSSSGWTAGAAAYYVGYLQPRTFLLKYNENGTITDAVDCALDPLSETKC
TLKSFTVEKGIYQTSNFRVQPTESIVRFPNITNLCPFGEVFNATRFASVYAWNRKRISNCVA
DYSVLYNSASFSTFKCYGVSPTKLNDLCFTNVYADSFVIRGDEVRQIAPGQTGKIADYNYKL
PDDFTGCVIAWNSNNLDSKVGGNYNYLYRLFRKSNLKPFERDISTEIYQAGSTPCNGVEGFN
CYFPLQSYGFQPTNGVGYQPYRVVVLSFELLHAPATVCGPKKSTNLVKNKCVNFNFNGLTGT
GVLTESNKKFLPFQQFGRDIADTTDAVRDPQTLEILDITPCSFGGVSVITPGTNTSNQVAVL
YQDVNCTEVPVAIHADQLTPTWRVYSTGSNVFQTRAGCLIGAEHVNNSYECDIPIGAGICAS
YQTQTNSPGSASSVASQSIIAYTMSLGAENSVAYSNNSIAIPTNFTISVTTEILPVSMTKTS
VDCTMYICGDSTECSNLLLQYGSFCTQLNRALTGIAVEQDKNTQEVFAQVKQIYKTPPIKDF
GGFNFSQILPDPSKPSKRSFIEDLLFNKVTLADAGFIKQYGDCLGDIAARDLICAQKFNGLT
VLPPLLTDEMIAQYTSALLAGTITSGWTFGAGAALQIPFAMQMAYRFNGIGVTQNVLYENQK
LIANQFNSAIGKIQDSLSSTASALGKLQDVVNQNAQALNTLVKQLSSNFGAISSVLNDILSR
LDPPEAEVQIDRLITGRLQSLQTYVTQQLIRAAEIRASANLAATKMSECVLGQSKRVDFCGK
GYHLMSFPQSAPHGVVFLHVTYVPAQEKNFTTAPAICHDGKAHFPREGVFVSNGTHWFVTQR
NFYEPQIITTDNTFVSGNCDVVIGIVNNTVYDPLQPELDSFKEELDKYFKNHTSPDVDLGDI
SGINASVVNIQKEIDRLNEVAKNLNESLIDLQELGKYEQYIKWPWYIWLGFIAGLIAIVMVT
IMLVVYMVSRDNVSCSICL
(PDI) Modified SARS-CoV-2 S protein GSAS + PP with H5i Hemagglutinin CT (alternative
1) AA
(SEQ ID NO: 59)
MAKNVAIFGLLFSLLVLVPSQIFAVNLTTRTQLPPAYTNSFTRGVYYPDKVFRSSVLHSTQD
LFLPFFSNVTWFHAIHVSGTNGTKRFDNPVLPFNDGVYFASTEKSNIIRGWIFGTTLDSKTQ
SLLIVNNATNVVIKVCEFQFCNDPFLGVYYHKNNKSWMESEFRVYSSANNCTFEYVSQPFLM
DLEGKQGNFKNLREFVFKNIDGYFKIYSKHTPINLVRDLPQGFSALEPLVDLPIGINITRFQ
TLLALHRSYLTPGDSSSGWTAGAAAYYVGYLQPRTFLLKYNENGTITDAVDCALDPLSETKC
TLKSFTVEKGIYQTSNFRVQPTESIVRFPNITNLCPFGEVFNATRFASVYAWNRKRISNCVA
DYSVLYNSASFSTFKCYGVSPTKLNDLCFTNVYADSFVIRGDEVRQIAPGQTGKIADYNYKL
PDDFTGCVIAWNSNNLDSKVGGNYNYLYRLFRKSNLKPFERDISTEIYQAGSTPCNGVEGFN
CYFPLQSYGFQPTNGVGYQPYRVVVLSFELLHAPATVCGPKKSTNLVKNKCVNFNFNGLTGT
GVLTESNKKFLPFQQFGRDIADTTDAVRDPQTLEILDITPCSFGGVSVITPGTNTSNQVAVL
YQDVNCTEVPVAIHADQLTPTWRVYSTGSNVFQTRAGCLIGAEHVNNSYECDIPIGAGICAS
YQTQTNSPGSASSVASQSIIAYTMSLGAENSVAYSNNSIAIPTNFTISVTTEILPVSMTKTS
VDCTMYICGDSTECSNLLLQYGSFCTQLNRALTGIAVEQDKNTQEVFAQVKQIYKTPPIKDF
GGFNFSQILPDPSKPSKRSFIEDLLFNKVTLADAGFIKQYGDCLGDIAARDLICAQKFNGLT
VLPPLLTDEMIAQYTSALLAGTITSGWTFGAGAALQIPFAMQMAYRENGIGVTQNVLYENQK
LIANQFNSAIGKIQDSLSSTASALGKLQDVVNQNAQALNTLVKQLSSNFGAISSVLNDILSR
LDPPEAEVQIDRLITGRLQSLQTYVTQQLIRAAEIRASANLAATKMSECVLGQSKRVDFCGK
GYHLMSFPQSAPHGVVFLHVTYVPAQEKNFTTAPAICHDGKAHFPREGVFVSNGTHWFVTQR
NFYEPQIITTDNTFVSGNCDVVIGIVNNTVYDPLQPELDSFKEELDKYFKNHTSPDVDLGDI
SGINASVVNIQKEIDRLNEVAKNLNESLIDLQELGKYEQYIKWPWYIWLGFIAGLIAIVMVT
IMMAGLSLWMCSNGSLQCRICI
(PDI) Modified SARS-CoV-2 S protein GSAS + PP with H5i Hemagglutinin CT (alternative
2) AA
(SEQ ID NO: 60)
MAKNVAIFGLLFSLLVLVPSQIFAVNLTTRTQLPPAYTNSFTRGVYYPDKVFRSSVLHSTQD
LFLPFFSNVTWFHAIHVSGTNGTKRFDNPVLPFNDGVYFASTEKSNIIRGWIFGTTLDSKTQ
SLLIVNNATNVVIKVCEFQFCNDPFLGVYYHKNNKSWMESEFRVYSSANNCTFEYVSQPFLM
DLEGKQGNFKNLREFVFKNIDGYFKIYSKHTPINLVRDLPQGFSALEPLVDLPIGINITRFQ
TLLALHRSYLTPGDSSSGWTAGAAAYYVGYLQPRTFLLKYNENGTITDAVDCALDPLSETKC
TLKSFTVEKGIYQTSNFRVQPTESIVRFPNITNLCPFGEVFNATRFASVYAWNRKRISNCVA
DYSVLYNSASFSTFKCYGVSPTKLNDLCFTNVYADSFVIRGDEVRQIAPGQTGKIADYNYKL
PDDFTGCVIAWNSNNLDSKVGGNYNYLYRLFRKSNLKPFERDISTEIYQAGSTPCNGVEGFN
CYFPLQSYGFQPTNGVGYQPYRVVVLSFELLHAPATVCGPKKSTNLVKNKCVNFNFNGLTGT
GVLTESNKKFLPFQQFGRDIADTTDAVRDPQTLEILDITPCSFGGVSVITPGTNTSNQVAVL
YQDVNCTEVPVAIHADQLTPTWRVYSTGSNVFQTRAGCLIGAEHVNNSYECDIPIGAGICAS
YQTQTNSPGSASSVASQSIIAYTMSLGAENSVAYSNNSIAIPTNFTISVTTEILPVSMTKTS
VDCTMYICGDSTECSNLLLQYGSFCTQLNRALTGIAVEQDKNTQEVFAQVKQIYKTPPIKDF
GGFNFSQILPDPSKPSKRSFIEDLLFNKVTLADAGFIKQYGDCLGDIAARDLICAQKFNGLT
VLPPLLTDEMIAQYTSALLAGTITSGWTFGAGAALQIPFAMQMAYRFNGIGVTQNVLYENQK
LIANQFNSAIGKIQDSLSSTASALGKLQDVVNQNAQALNTLVKQLSSNFGAISSVLNDILSR
LDPPEAEVQIDRLITGRLQSLQTYVTQQLIRAAEIRASANLAATKMSECVLGQSKRVDFCGK
GYHLMSFPQSAPHGVVFLHVTYVPAQEKNFTTAPAICHDGKAHFPREGVFVSNGTHWFVTQR
NFYEPQIITTDNTFVSGNCDVVIGIVNNTVYDPLQPELDSFKEELDKYFKNHTSPDVDLGDI
SGINASVVNIQKEIDRLNEVAKNLNESLIDLQELGKYEQYIKWPWYIWLGFIAGLIAIVMVT
IMAGLSLWMCSNGSLQCRICI
(PDI) Modified SARS-CoV-2 S protein GSAS + PP with H5i Hemagglutinin CT (alternative
3) AA
(SEQ ID NO: 61)
MAKNVAIFGLLFSLLVLVPSQIFAVNLTTRTQLPPAYTNSFTRGVYYPDKVFRSSVLHSTQD
LFLPFFSNVTWFHAIHVSGTNGTKRFDNPVLPFNDGVYFASTEKSNIIRGWIFGTTLDSKTQ
SLLIVNNATNVVIKVCEFQFCNDPFLGVYYHKNNKSWMESEFRVYSSANNCTFEYVSQPFLM
DLEGKQGNFKNLREFVFKNIDGYFKIYSKHTPINLVRDLPQGFSALEPLVDLPIGINITRFQ
TLLALHRSYLTPGDSSSGWTAGAAAYYVGYLQPRTFLLKYNENGTITDAVDCALDPLSETKC
TLKSFTVEKGIYQTSNFRVQPTESIVRFPNITNLCPFGEVFNATRFASVYAWNRKRISNCVA
DYSVLYNSASFSTFKCYGVSPTKLNDLCFTNVYADSFVIRGDEVRQIAPGQTGKIADYNYKL
PDDFTGCVIAWNSNNLDSKVGGNYNYLYRLFRKSNLKPFERDISTEIYQAGSTPCNGVEGFN
CYFPLQSYGFQPTNGVGYQPYRVVVLSFELLHAPATVCGPKKSTNLVKNKCVNFNFNGLTGT
GVLTESNKKFLPFQQFGRDIADTTDAVRDPQTLEILDITPCSFGGVSVITPGTNTSNQVAVL
YQDVNCTEVPVAIHADQLTPTWRVYSTGSNVFQTRAGCLIGAEHVNNSYECDIPIGAGICAS
YQTQTNSPGSASSVASQSIIAYTMSLGAENSVAYSNNSIAIPTNFTISVTTEILPVSMTKTS
VDCTMYICGDSTECSNLLLQYGSFCTQLNRALTGIAVEQDKNTQEVFAQVKQIYKTPPIKDF
GGFNFSQILPDPSKPSKRSFIEDLLFNKVTLADAGFIKQYGDCLGDIAARDLICAQKFNGLT
VLPPLLTDEMIAQYTSALLAGTITSGWTFGAGAALQIPFAMQMAYRENGIGVTQNVLYENQK
LIANQFNSAIGKIQDSLSSTASALGKLQDVVNQNAQALNTLVKQLSSNFGAISSVLNDILSR
LDPPEAEVQIDRLITGRLQSLQTYVTQQLIRAAEIRASANLAATKMSECVLGQSKRVDFCGK
GYHLMSFPQSAPHGVVFLHVTYVPAQEKNFTTAPAICHDGKAHFPREGVFVSNGTHWFVTQR
NFYEPQIITTDNTFVSGNCDVVIGIVNNTVYDPLQPELDSFKEELDKYFKNHTSPDVDLGDI
SGINASVVNIQKEIDRLNEVAKNLNESLIDLQELGKYEQYIKWPWYIWLGFIAGLIAIVMVT
IMLCCMCSNGSLQCRICI
(PDI) Modified SARS-CoV-2 S protein GSAS + PP with H5i Hemagglutinin CT (alternative
4) AA
(SEQ ID NO: 62)
MAKNVAIFGLLFSLLVLVPSQIFAVNLTTRTQLPPAYTNSFTRGVYYPDKVFRSSVLHSTQD
LFLPFFSNVTWFHAIHVSGTNGTKRFDNPVLPFNDGVYFASTEKSNIIRGWIFGTTLDSKTQ
SLLIVNNATNVVIKVCEFQFCNDPFLGVYYHKNNKSWMESEFRVYSSANNCTFEYVSQPFLM
DLEGKQGNFKNLREFVFKNIDGYFKIYSKHTPINLVRDLPQGFSALEPLVDLPIGINITRFQ
TLLALHRSYLTPGDSSSGWTAGAAAYYVGYLQPRTFLLKYNENGTITDAVDCALDPLSETKC
TLKSFTVEKGIYQTSNFRVQPTESIVRFPNITNLCPFGEVFNATRFASVYAWNRKRISNCVA
DYSVLYNSASFSTFKCYGVSPTKLNDLCFTNVYADSFVIRGDEVRQIAPGQTGKIADYNYKL
PDDFTGCVIAWNSNNLDSKVGGNYNYLYRLFRKSNLKPFERDISTEIYQAGSTPCNGVEGFN
CYFPLQSYGFQPTNGVGYQPYRVVVLSFELLHAPATVCGPKKSTNLVKNKCVNFNFNGLTGT
GVLTESNKKFLPFQQFGRDIADTTDAVRDPQTLEILDITPCSFGGVSVITPGTNTSNQVAVL
YQDVNCTEVPVAIHADQLTPTWRVYSTGSNVFQTRAGCLIGAEHVNNSYECDIPIGAGICAS
YQTQTNSPGSASSVASQSIIAYTMSLGAENSVAYSNNSIAIPTNFTISVTTEILPVSMTKTS
VDCTMYICGDSTECSNLLLQYGSFCTQLNRALTGIAVEQDKNTQEVFAQVKQIYKTPPIKDF
GGFNFSQILPDPSKPSKRSFIEDLLFNKVTLADAGFIKQYGDCLGDIAARDLICAQKFNGLT
VLPPLLTDEMIAQYTSALLAGTITSGWTFGAGAALQIPFAMQMAYRFNGIGVTQNVLYENQK
LIANQFNSAIGKIQDSLSSTASALGKLQDVVNQNAQALNTLVKQLSSNFGAISSVLNDILSR
LDPPEAEVQIDRLITGRLQSLQTYVTQQLIRAAEIRASANLAATKMSECVLGQSKRVDFCGK
GYHLMSFPQSAPHGVVFLHVTYVPAQEKNFTTAPAICHDGKAHFPREGVFVSNGTHWFVTQR
NFYEPQIITTDNTFVSGNCDVVIGIVNNTVYDPLQPELDSFKEELDKYFKNHTSPDVDLGDI
SGINASVVNIQKEIDRLNEVAKNLNESLIDLQELGKYEQYIKWPWYIWLGFIAGLIAIVMVT
IMLCCSNGSLQCRICI
N-terminal region of the native SARS-CoV-2 S protein (native signal peptide sequence
underlined)
(SEQ ID NO: 63)
MFVFLVLLPLVSSQCVNLTTRTQLPPAYTNS
Modified TMCT with intervening peptide sequence (X)ₙ
(SEQ ID NO: 64)
WYIWLGFIAGLIAIVMVTIM(X)ₙCSNGSXXCXICI
PDI-S Protein GSAS + 4P-DNA
(SEQ ID NO: 65)
atggcgaaaaacgttgcgattttcggcttattgttttctcttcttgtgttggttccttctca
gatcttcgcggtgaatcttacgacgcgaacacagttaccacccgcatatacaaatagcttca
ctcggggtgtttattaccccgacaaagtgttcaggtcctccgtgctccactcaacacaggac
ctctttcttcctttcttttctaacgtgacatggtttcatgccattcatgtatccggcactaa
cggtactaagaggttcgataatcctgtgctccctttcaatgacggcgtttactttgcaagca
cagagaagagtaacatcatccgaggttggatctttggcactaccctcgattcaaagacgcag
agcctcctcattgtgaacaatgccactaacgtggtgatcaaagtttgcgagtttcagttctg
caatgaccctttcttgggggtgtactatcataagaacaacaagtcttggatggaatctgaat
tccgcgtctatagcagcgccaacaactgcacctttgaatacgtgtcccagcccttccttatg
gacctggagggaaagcagggaaactttaagaatctgagagagttcgtgtttaaaaatatcga
cggctattttaagatctattctaagcacacgcctattaatctcgtgcgcgatcttccacaag
gcttcagcgccctggaaccactcgtggacctcccaattggtatcaacatcactagatttcag
actctgcttgccctccaccgatcctatctgacacccggagactcctctagcggctggactgc
cggcgctgccgcttattacgttggttatcttcagccacgcacgttcctgctgaagtataacg
agaatggtactattaccgatgccgtggattgtgcccttgaccccctgtccgaaactaagtgc
acactcaagtcattcactgtggaaaaaggaatctaccagacaagcaattttcgggtccagcc
tactgagagcattgtgcgctttcctaacatcacaaatctttgccccttcggagaggttttca
atgctacacggtttgcctccgtgtatgcctggaaccgcaagagaatttccaattgcgtggcc
gattactccgtgctctacaatagtgcaagctttagcacctttaagtgctatggcgtatcccc
tactaagcttaacgacttgtgtttcacaaacgtgtatgccgactcctttgtgatacggggcg
acgaagttagacagatagcaccaggacagacgggaaagatagctgactacaactataagctt
cctgatgacttcactggctgcgttatcgcgtggaattctaacaacctggactcaaaagtcgg
cggcaactataactatctctatcggctgttccgcaagagtaaccttaagccctttgagagag
atataagcactgaaatctaccaggctggcagtacgccctgtaatggcgtggaaggctttaat
tgttattttccactgcaatcctatggttttcagccaaccaatggcgtgggctaccaaccata
ccgcgtcgtggtgctctcctttgaactgctccacgctcccgcgactgtctgcggccccaaga
agtccacgaaccttgtgaagaataagtgcgttaattttaatttcaacggcctcactggaaca
ggagtgctcactgagagtaacaagaagttcctgccatttcaacaatttggcagagacatagc
cgatactactgacgccgttagggacccccagaccctcgagattctcgatataacgccctgct
ccttcggtggagtttccgtgatcacgccaggcaccaataccagtaaccaggtcgccgtgctg
tatcaggatgtcaactgtactgaggtgcccgtagccatccatgcggatcagctcacaccaac
ttggagggtgtacagcaccggctccaatgtattccagactcgggccggatgccttattggcg
ccgaacacgtgaacaatagttacgaatgcgatattccaattggcgccggaatctgtgctagc
taccagactcagacgaactccccaggcagcgccagcagcgttgccagccagtcaatcatcgc
ttatacaatgtcacttggagccgaaaactccgtggcttactcaaacaacagcatcgccatcc
ccacaaacttcaccatatccgtgacaactgagattctgccagtgtccatgactaagacgtcc
gtagattgcactatgtacatatgcggcgacagcacagaatgttctaatctgctgctgcaata
tggaagcttctgcactcaactgaacagagcgctcacaggcatcgccgtggagcaggataaga
atacccaggaggtgttcgcccaagttaagcagatctacaagaccccacccataaaggatttc
ggtggattcaattttagtcagatactcccagacccatctaagccatccaagaggagccccat
cgaggatcttttgtttaacaaagttactctggccgacgccggtttcatcaagcagtacggag
attgcctcggcgacatcgctgctcgtgacctcatctgtgcgcaaaagtttaacggtctgacg
gtgctgcctcccctccttactgatgaaatgatcgcccagtataccagcgcactcctcgctgg
caccataacatccggttggacattcggcgctggtgcagcactgcagataccattcgccatgc
aaatggcatatcgtttcaacggtatcggtgtcacacagaatgtcctatatgagaaccagaag
ctgatcgcaaatcagttcaatagtgccatcggaaaaatccaggatagccttagcagcacacc
ctcagcccttggcaaactccaggatgtcgtgaaccagaatgcccaggctctcaataccctcg
tgaagcagctctcatctaatttcggcgcaatttccagtgtcctcaacgacatcctcagccgc
ctcgacccccccgaggccgaagtgcagattgacagactgattacaggtcgactccagagcct
ccagacttacgtgactcagcagctgataagagccgccgagataagggccagcgctaacctgg
ctgccacaaagatgtctgagtgcgtgctgggccagtccaagagagtagacttctgtggcaaa
ggctaccatctgatgagcttcccacaatccgcacctcacggcgtagtgttcctccacgtgac
atatgtaccggctcaggagaagaatttcactaccgctcctgctatatgccatgatggaaagg
ctcacttcccccgggagggggtgttcgtgtccaacggcacccattggtttgtgactcagcgg
aatttctacgaaccccagatcataaccactgacaacacatttgtgtccggaaattgtgacgt
ggtcattggaatagtgaacaacactgtttatgatccactgcagccagaacttgacagcttta
aggaggagctcgacaagtacttcaagaatcatacgtcaccagatgtggacctcggagatatt
agcggtatcaatgccagtgttgtcaatattcagaaggaaatagaccgccttaatgaggtcgc
caaaaatctgaacgagagcctcatcgatcttcaggagctgggcaaatatgagcagtacatca
agtggccttggtatatttggcttggcttcatcgccggcctgatcgccatagtaatggtcaca
attatgctctctttatggatgtgctccaatggatcgttacaatgcagaatttgcatttaa
PDI-S Protein GSAS + 6P-DNA
(SEQ ID NO: 66)
atggcgaaaaacgttgcgattttcggcttattgttttctcttcttgtgttggttccttctca
gatcttcgcggtgaatcttacgacgcgaacacagttaccacccgcatatacaaatagcttca
ctcggggtgtttattaccccgacaaagtgttcaggtcctccgtgctccactcaacacaggac
ctctttcttcctttcttttctaacgtgacatggtttcatgccattcatgtatccggcactaa
cggtactaagaggttcgataatcctgtgctccctttcaatgacggcgtttactttgcaagca
cagagaagagtaacatcatccgaggttggatctttggcactaccctcgattcaaagacgcag
agcctcctcattgtgaacaatgccactaacgtggtgatcaaagtttgcgagtttcagttctg
caatgaccctttcttgggggtgtactatcataagaacaacaagtcttggatggaatctgaat
tccgcgtctatagcagcgccaacaactgcacctttgaatacgtgtcccagcccttccttatg
gacctggagggaaagcagggaaactttaagaatctgagagagttcgtgtttaaaaatatcga
cggctattttaagatctattctaagcacacgcctattaatctcgtgcgcgatcttccacaag
gcttcagcgccctggaaccactcgtggacctcccaattggtatcaacatcactagatttcag
actctgcttgccctccaccgatcctatctgacacccggagactcctctagcggctggactgc
cggcgctgccgcttattacgttggttatcttcagccacgcacgttcctgctgaagtataacg
agaatggtactattaccgatgccgtggattgtgcccttgaccccctgtccgaaactaagtgc
acactcaagtcattcactgtggaaaaaggaatctaccagacaagcaattttcgggtccagcc
tactgagagcattgtgcgctttcctaacatcacaaatctttgccccttcggagaggttttca
atgctacacggtttgcctccgtgtatgcctggaaccgcaagagaatttccaattgcgtggcc
gattactccgtgctctacaatagtgcaagctttagcacctttaagtgctatggcgtatcccc
tactaagcttaacgacttgtgtttcacaaacgtgtatgccgactcctttgtgatacggggcg
acgaagttagacagatagcaccaggacagacgggaaagatagctgactacaactataagctt
cctgatgacttcactggctgcgttatcgcgtggaattctaacaacctggactcaaaagtcgg
cggcaactataactatctctatcggctgttccgcaagagtaaccttaagccctttgagagag
atataagcactgaaatctaccaggctggcagtacgccctgtaatggcgtggaaggctttaat
tgttattttccactgcaatcctatggttttcagccaaccaatggcgtgggctaccaaccata
ccgcgtcgtggtgctctcctttgaactgctccacgctcccgcgactgtctgcggccccaaga
agtccacgaaccttgtgaagaataagtgcgttaattttaatttcaacggcctcactggaaca
ggagtgctcactgagagtaacaagaagttcctgccatttcaacaatttggcagagacatagc
cgatactactgacgccgttagggacccccagaccctcgagattctcgatataacgccctgct
ccttcggtggagtttccgtgatcacgccaggcaccaataccagtaaccaggtcgccgtgctg
tatcaggatgtcaactgtactgaggtgcccgtagccatccatgcggatcagctcacaccaac
ttggagggtgtacagcaccggctccaatgtattccagactcgggccggatgccttattggcg
ccgaacacgtgaacaatagttacgaatgcgatattccaattggcgccggaatctgtgctagc
taccagactcagacgaactccccaggcagcgccagcagcgttgccagccagtcaatcatcgc
ttatacaatgtcacttggagccgaaaactccgtggcttactcaaacaacagcatcgccatcc
ccacaaacttcaccatatccgtgacaactgagattctgccagtgtccatgactaagacgtcc
gtagattgcactatgtacatatgcggcgacagcacagaatgttctaatctgctgctgcaata
tggaagcttctgcactcaactgaacagagcgctcacaggcatcgccgtggagcaggataaga
atacccaggaggtgttcgcccaagttaagcagatctacaagaccccacccataaaggatttc
ggtggattcaattttagtcagatactcccagacccatctaagccatccaagaggagccccat
cgaggatcttttgtttaacaaagttactctggccgacgccggtttcatcaagcagtacggag
attgcctcggcgacatcgctgctcgtgacctcatctgtgcgcaaaagtttaacggtctgacg
gtgctgcctcccctccttactgatgaaatgatcgcccagtataccagcgcactcctcgctgg
caccataacatccggttggacattcggcgctggtcccgcactgcagataccattccccatgc
aaatggcatatcgtttcaacggtatcggtgtcacacagaatgtcctatatgagaaccagaag
ctgatcgcaaatcagttcaatagtgccatcggaaaaatccaggatagccttagcagcacacc
ctcagcccttggcaaactccaggatgtcgtgaaccagaatgcccaggctctcaataccctcg
tgaagcagctctcatctaatttcggcgcaatttccagtgtcctcaacgacatcctcagccgc
ctcgacccccccgaggccgaagtgcagattgacagactgattacaggtcgactccagagcct
ccagacttacgtgactcagcagctgataagagccgccgagataagggccagcgctaacctgg
ctgccacaaagatgtctgagtgcgtgctgggccagtccaagagagtagacttctgtggcaaa
ggctaccatctgatgagcttcccacaatccgcacctcacggcgtagtgttcctccacgtgac
atatgtaccggctcaggagaagaatttcactaccgctcctgctatatgccatgatggaaagg
ctcacttcccccgggagggggtgttcgtgtccaacggcacccattggtttgtgactcagcgg
aatttctacgaaccccagatcataaccactgacaacacatttgtgtccggaaattgtgacgt
ggtcattggaatagtgaacaacactgtttatgatccactgcagccagaacttgacagcttta
aggaggagctcgacaagtacttcaagaatcatacgtcaccagatgtggacctcggagatatt
agcggtatcaatgccagtgttgtcaatattcagaaggaaatagaccgccttaatgaggtcgc
caaaaatctgaacgagagcctcatcgatcttcaggagctgggcaaatatgagcagtacatca
agtggccttggtatatttggcttggcttcatcgccggcctgatcgccatagtaatggtcaca
attatgctctctttatggatgtgctccaatggatcgttacaatgcagaatttgcatttaa
PDI-S Protein GSAS + 2P + L923F-DNA
(SEQ ID NO: 67)
atggcgaaaaacgttgcgattttcggcttattgttttctcttcttgtgttggttccttctca
gatcttcgcggtgaatcttacgacgcgaacacagttaccacccgcatatacaaatagcttca
ctcggggtgtttattaccccgacaaagtgttcaggtcctccgtgctccactcaacacaggac
ctctttcttcctttcttttctaacgtgacatggtttcatgccattcatgtatccggcactaa
cggtactaagaggttcgataatcctgtgctccctttcaatgacggcgtttactttgcaagca
cagagaagagtaacatcatccgaggttggatctttggcactaccctcgattcaaagacgcag
agcctcctcattgtgaacaatgccactaacgtggtgatcaaagtttgcgagtttcagttctg
caatgaccctttcttgggggtgtactatcataagaacaacaagtcttggatggaatctgaat
tccgcgtctatagcagcgccaacaactgcacctttgaatacgtgtcccagcccttccttatg
gacctggagggaaagcagggaaactttaagaatctgagagagttcgtgtttaaaaatatcga
cggctattttaagatctattctaagcacacgcctattaatctcgtgcgcgatcttccacaag
gcttcagcgccctggaaccactcgtggacctcccaattggtatcaacatcactagatttcag
actctgcttgccctccaccgatcctatctgacacccggagactcctctagcggctggactgc
cggcgctgccgcttattacgttggttatcttcagccacgcacgttcctgctgaagtataacg
agaatggtactattaccgatgccgtggattgtgcccttgaccccctgtccgaaactaagtgc
acactcaagtcattcactgtggaaaaaggaatctaccagacaagcaattttcgggtccagcc
tactgagagcattgtgcgctttcctaacatcacaaatctttgccccttcggagaggttttca
atgctacacggtttgcctccgtgtatgcctggaaccgcaagagaatttccaattgcgtggcc
gattactccgtgctctacaatagtgcaagctttagcacctttaagtgctatggcgtatcccc
tactaagcttaacgacttgtgtttcacaaacgtgtatgccgactcctttgtgatacggggcg
acgaagttagacagatagcaccaggacagacgggaaagatagctgactacaactataagctt
cctgatgacttcactggctgcgttatcgcgtggaattctaacaacctggactcaaaagtcgg
cggcaactataactatctctatcggctgttccgcaagagtaaccttaagccctttgagagag
atataagcactgaaatctaccaggctggcagtacgccctgtaatggcgtggaaggctttaat
tgttattttccactgcaatcctatggttttcagccaaccaatggcgtgggctaccaaccata
ccgcgtcgtggtgctctcctttgaactgctccacgctcccgcgactgtctgcggccccaaga
agtccacgaaccttgtgaagaataagtgcgttaattttaatttcaacggcctcactggaaca
ggagtgctcactgagagtaacaagaagttcctgccatttcaacaatttggcagagacatagc
cgatactactgacgccgttagggacccccagaccctcgagattctcgatataacgccctgct
ccttcggtggagtttccgtgatcacgccaggcaccaataccagtaaccaggtcgccgtgctg
tatcaggatgtcaactgtactgaggtgcccgtagccatccatgcggatcagctcacaccaac
ttggagggtgtacagcaccggctccaatgtattccagactcgggccggatgccttattggcg
ccgaacacgtgaacaatagttacgaatgcgatattccaattggcgccggaatctgtgctagc
taccagactcagacgaactccccaggcagcgccagcagcgttgccagccagtcaatcatcgc
ttatacaatgtcacttggagccgaaaactccgtggcttactcaaacaacagcatcgccatcc
ccacaaacttcaccatatccgtgacaactgagattctgccagtgtccatgactaagacgtcc
gtagattgcactatgtacatatgcggcgacagcacagaatgttctaatctgctgctgcaata
tggaagcttctgcactcaactgaacagagcgctcacaggcatcgccgtggagcaggataaga
atacccaggaggtgttcgcccaagttaagcagatctacaagaccccacccataaaggatttc
ggtggattcaattttagtcagatactcccagacccatctaagccatccaagaggagctttat
cgaggatcttttgtttaacaaagttactctggccgacgccggtttcatcaagcagtacggag
attgcctcggcgacatcgctgctcgtgacctcatctgtgcgcaaaagtttaacggtctgacg
gtgctgcctcccctccttactgatgaaatgatcgcccagtataccagcgcactcctcgctgg
caccataacatccggttggacattcggcgctggtgcagcactgcagataccattcgccatgc
aaatggcatatcgtttcaacggtatcggtgtcacacagaatgtcctatatgagaaccagaag
ctgatcgcaaatcagttcaatagtgccatcggaaaaatccaggatagcttcagcagcacagc
ctcagcccttggcaaactccaggatgtcgtgaaccagaatgcccaggctctcaataccctcg
tgaagcagctctcatctaatttcggcgcaatttccagtgtcctcaacgacatcctcagccgc
ctcgacccccccgaggccgaagtgcagattgacagactgattacaggtcgactccagagcct
ccagacttacgtgactcagcagctgataagagccgccgagataagggccagcgctaacctgg
ctgccacaaagatgtctgagtgcgtgctgggccagtccaagagagtagacttctgtggcaaa
ggctaccatctgatgagcttcccacaatccgcacctcacggcgtagtgttcctccacgtgac
atatgtaccggctcaggagaagaatttcactaccgctcctgctatatgccatgatggaaagg
ctcacttcccccgggagggggtgttcgtgtccaacggcacccattggtttgtgactcagcgg
aatttctacgaaccccagatcataaccactgacaacacatttgtgtccggaaattgtgacgt
ggtcattggaatagtgaacaacactgtttatgatccactgcagccagaacttgacagcttta
aggaggagctcgacaagtacttcaagaatcatacgtcaccagatgtggacctcggagatatt
agcggtatcaatgccagtgttgtcaatattcagaaggaaatagaccgccttaatgaggtcgc
caaaaatctgaacgagagcctcatcgatcttcaggagctgggcaaatatgagcagtacatca
agtggccttggtatatttggcttggcttcatcgccggcctgatcgccatagtaatggtcaca
attatgctctctttatggatgtgctccaatggatcgttacaatgcagaatttgcatttaa
PDI-S Protein GSAS + 4P + L923F-DNA
(SEQ ID NO: 68)
atggcgaaaaacgttgcgattttcggcttattgttttctcttcttgtgttggttccttctca
gatcttcgcggtgaatcttacgacgcgaacacagttaccacccgcatatacaaatagcttca
ctcggggtgtttattaccccgacaaagtgttcaggtcctccgtgctccactcaacacaggac
ctctttcttcctttcttttctaacgtgacatggtttcatgccattcatgtatccggcactaa
cggtactaagaggttcgataatcctgtgctccctttcaatgacggcgtttactttgcaagca
cagagaagagtaacatcatccgaggttggatctttggcactaccctcgattcaaagacgcag
agcctcctcattgtgaacaatgccactaacgtggtgatcaaagtttgcgagtttcagttctg
caatgaccctttcttgggggtgtactatcataagaacaacaagtcttggatggaatctgaat
tccgcgtctatagcagcgccaacaactgcacctttgaatacgtgtcccagcccttccttatg
gacctggagggaaagcagggaaactttaagaatctgagagagttcgtgtttaaaaatatcga
cggctattttaagatctattctaagcacacgcctattaatctcgtgcgcgatcttccacaag
gcttcagcgccctggaaccactcgtggacctcccaattggtatcaacatcactagatttcag
actctgcttgccctccaccgatcctatctgacacccggagactcctctagcggctggactgc
cggcgctgccgcttattacgttggttatcttcagccacgcacgttcctgctgaagtataacg
agaatggtactattaccgatgccgtggattgtgcccttgaccccctgtccgaaactaagtgc
acactcaagtcattcactgtggaaaaaggaatctaccagacaagcaattttcgggtccagcc
tactgagagcattgtgcgctttcctaacatcacaaatctttgccccttcggagaggttttca
atgctacacggtttgcctccgtgtatgcctggaaccgcaagagaatttccaattgcgtggcc
gattactccgtgctctacaatagtgcaagctttagcacctttaagtgctatggcgtatcccc
tactaagcttaacgacttgtgtttcacaaacgtgtatgccgactcctttgtgatacggggcg
acgaagttagacagatagcaccaggacagacgggaaagatagctgactacaactataagctt
cctgatgacttcactggctgcgttatcgcgtggaattctaacaacctggactcaaaagtcgg
cggcaactataactatctctatcggctgttccgcaagagtaaccttaagccctttgagagag
atataagcactgaaatctaccaggctggcagtacgccctgtaatggcgtggaaggctttaat
tgttattttccactgcaatcctatggttttcagccaaccaatggcgtgggctaccaaccata
ccgcgtcgtggtgctctcctttgaactgctccacgctcccgcgactgtctgcggccccaaga
agtccacgaaccttgtgaagaataagtgcgttaattttaatttcaacggcctcactggaaca
ggagtgctcactgagagtaacaagaagttcctgccatttcaacaatttggcagagacatagc
cgatactactgacgccgttagggacccccagaccctcgagattctcgatataacgccctgct
ccttcggtggagtttccgtgatcacgccaggcaccaataccagtaaccaggtcgccgtgctg
tatcaggatgtcaactgtactgaggtgcccgtagccatccatgcggatcagctcacaccaac
ttggagggtgtacagcaccggctccaatgtattccagactcgggccggatgccttattggcg
ccgaacacgtgaacaatagttacgaatgcgatattccaattggcgccggaatctgtgctagc
taccagactcagacgaactccccaggcagcgccagcagcgttgccagccagtcaatcatcgc
ttatacaatgtcacttggagccgaaaactccgtggcttactcaaacaacagcatcgccatcc
ccacaaacttcaccatatccgtgacaactgagattctgccagtgtccatgactaagacgtcc
gtagattgcactatgtacatatgcggcgacagcacagaatgttctaatctgctgctgcaata
tggaagcttctgcactcaactgaacagagcgctcacaggcatcgccgtggagcaggataaga
atacccaggaggtgttcgcccaagttaagcagatctacaagaccccacccataaaggatttc
ggtggattcaattttagtcagatactcccagacccatctaagccatccaagaggagccccat
cgaggatcttttgtttaacaaagttactctggccgacgccggtttcatcaagcagtacggag
attgcctcggcgacatcgctgctcgtgacctcatctgtgcgcaaaagtttaacggtctgacg
gtgctgcctcccctccttactgatgaaatgatcgcccagtataccagcgcactcctcgctgg
caccataacatccggttggacattcggcgctggtgcagcactgcagataccattcgccatgc
aaatggcatatcgtttcaacggtatcggtgtcacacagaatgtcctatatgagaaccagaag
ctgatcgcaaatcagttcaatagtgccatcggaaaaatccaggatagcttcagcagcacacc
ctcagcccttggcaaactccaggatgtcgtgaaccagaatgcccaggctctcaataccctcg
tgaagcagctctcatctaatttcggcgcaatttccagtgtcctcaacgacatcctcagccgc
ctcgacccccccgaggccgaagtgcagattgacagactgattacaggtcgactccagagcct
ccagacttacgtgactcagcagctgataagagccgccgagataagggccagcgctaacctgg
ctgccacaaagatgtctgagtgcgtgctgggccagtccaagagagtagacttctgtggcaaa
ggctaccatctgatgagcttcccacaatccgcacctcacggcgtagtgttcctccacgtgac
atatgtaccggctcaggagaagaatttcactaccgctcctgctatatgccatgatggaaagg
ctcacttcccccgggagggggtgttcgtgtccaacggcacccattggtttgtgactcagcgg
aatttctacgaaccccagatcataaccactgacaacacatttgtgtccggaaattgtgacgt
ggtcattggaatagtgaacaacactgtttatgatccactgcagccagaacttgacagcttta
aggaggagctcgacaagtacttcaagaatcatacgtcaccagatgtggacctcggagatatt
agcggtatcaatgccagtgttgtcaatattcagaaggaaatagaccgccttaatgaggtcgc
caaaaatctgaacgagagcctcatcgatcttcaggagctgggcaaatatgagcagtacatca
agtggccttggtatatttggcttggcttcatcgccggcctgatcgccatagtaatggtcaca
attatgctctctttatggatgtgctccaatggatcgttacaatgcagaatttgcatttaa
PDI-S Protein GSAS + 6P + L923F-DNA
(SEQ ID NO: 69)
atggcgaaaaacgttgcgattttcggcttattgttttctcttcttgtgttggttccttctca
gatcttcgcggtgaatcttacgacgcgaacacagttaccacccgcatatacaaatagcttca
ctcggggtgtttattaccccgacaaagtgttcaggtcctccgtgctccactcaacacaggac
ctctttcttcctttcttttctaacgtgacatggtttcatgccattcatgtatccggcactaa
cggtactaagaggttcgataatcctgtgctccctttcaatgacggcgtttactttgcaagca
cagagaagagtaacatcatccgaggttggatctttggcactaccctcgattcaaagacgcag
agcctcctcattgtgaacaatgccactaacgtggtgatcaaagtttgcgagtttcagttctg
caatgaccctttcttgggggtgtactatcataagaacaacaagtcttggatggaatctgaat
tccgcgtctatagcagcgccaacaactgcacctttgaatacgtgtcccagcccttccttatg
gacctggagggaaagcagggaaactttaagaatctgagagagttcgtgtttaaaaatatcga
cggctattttaagatctattctaagcacacgcctattaatctcgtgcgcgatcttccacaag
gcttcagcgccctggaaccactcgtggacctcccaattggtatcaacatcactagatttcag
actctgcttgccctccaccgatcctatctgacacccggagactcctctagcggctggactgc
cggcgctgccgcttattacgttggttatcttcagccacgcacgttcctgctgaagtataacg
agaatggtactattaccgatgccgtggattgtgcccttgaccccctgtccgaaactaagtgc
acactcaagtcattcactgtggaaaaaggaatctaccagacaagcaattttcgggtccagcc
tactgagagcattgtgcgctttcctaacatcacaaatctttgccccttcggagaggttttca
atgctacacggtttgcctccgtgtatgcctggaaccgcaagagaatttccaattgcgtggcc
gattactccgtgctctacaatagtgcaagctttagcacctttaagtgctatggcgtatcccc
tactaagcttaacgacttgtgtttcacaaacgtgtatgccgactcctttgtgatacggggcg
acgaagttagacagatagcaccaggacagacgggaaagatagctgactacaactataagctt
cctgatgacttcactggctgcgttatcgcgtggaattctaacaacctggactcaaaagtcgg
cggcaactataactatctctatcggctgttccgcaagagtaaccttaagccctttgagagag
atataagcactgaaatctaccaggctggcagtacgccctgtaatggcgtggaaggctttaat
tgttattttccactgcaatcctatggttttcagccaaccaatggcgtgggctaccaaccata
ccgcgtcgtggtgctctcctttgaactgctccacgctcccgcgactgtctgcggccccaaga
agtccacgaaccttgtgaagaataagtgcgttaattttaatttcaacggcctcactggaaca
ggagtgctcactgagagtaacaagaagttcctgccatttcaacaatttggcagagacatagc
cgatactactgacgccgttagggacccccagaccctcgagattctcgatataacgccctgct
ccttcggtggagtttccgtgatcacgccaggcaccaataccagtaaccaggtcgccgtgctg
tatcaggatgtcaactgtactgaggtgcccgtagccatccatgcggatcagctcacaccaac
ttggagggtgtacagcaccggctccaatgtattccagactcgggccggatgccttattggcg
ccgaacacgtgaacaatagttacgaatgcgatattccaattggcgccggaatctgtgctagc
taccagactcagacgaactccccaggcagcgccagcagcgttgccagccagtcaatcatcgc
ttatacaatgtcacttggagccgaaaactccgtggcttactcaaacaacagcatcgccatcc
ccacaaacttcaccatatccgtgacaactgagattctgccagtgtccatgactaagacgtcc
gtagattgcactatgtacatatgcggcgacagcacagaatgttctaatctgctgctgcaata
tggaagcttctgcactcaactgaacagagcgctcacaggcatcgccgtggagcaggataaga
atacccaggaggtgttcgcccaagttaagcagatctacaagaccccacccataaaggatttc
ggtggattcaattttagtcagatactcccagacccatctaagccatccaagaggagccccat
cgaggatcttttgtttaacaaagttactctggccgacgccggtttcatcaagcagtacggag
attgcctcggcgacatcgctgctcgtgacctcatctgtgcgcaaaagtttaacggtctgacg
gtgctgcctcccctccttactgatgaaatgatcgcccagtataccagcgcactcctcgctgg
caccataacatccggttggacattcggcgctggtcccgcactgcagataccattccccatgc
aaatggcatatcgtttcaacggtatcggtgtcacacagaatgtcctatatgagaaccagaag
ctgatcgcaaatcagttcaatagtgccatcggaaaaatccaggatagcttcagcagcacacc
ctcagcccttggcaaactccaggatgtcgtgaaccagaatgcccaggctctcaataccctcg
tgaagcagctctcatctaatttcggcgcaatttccagtgtcctcaacgacatcctcagccgc
ctcgacccccccgaggccgaagtgcagattgacagactgattacaggtcgactccagagcct
ccagacttacgtgactcagcagctgataagagccgccgagataagggccagcgctaacctgg
ctgccacaaagatgtctgagtgcgtgctgggccagtccaagagagtagacttctgtggcaaa
ggctaccatctgatgagcttcccacaatccgcacctcacggcgtagtgttcctccacgtgac
atatgtaccggctcaggagaagaatttcactaccgctcctgctatatgccatgatggaaagg
ctcacttcccccgggagggggtgttcgtgtccaacggcacccattggtttgtgactcagcgg
aatttctacgaaccccagatcataaccactgacaacacatttgtgtccggaaattgtgacgt
ggtcattggaatagtgaacaacactgtttatgatccactgcagccagaacttgacagcttta
aggaggagctcgacaagtacttcaagaatcatacgtcaccagatgtggacctcggagatatt
agcggtatcaatgccagtgttgtcaatattcagaaggaaatagaccgccttaatgaggtcgc
caaaaatctgaacgagagcctcatcgatcttcaggagctgggcaaatatgagcagtacatca
agtggccttggtatatttggcttggcttcatcgccggcctgatcgccatagtaatggtcaca
attatgctctctttatggatgtgctccaatggatcgttacaatgcagaatttgcatttaa
PDI-Modified S protein with H5i Hemagglutinin CT (V1) DNA
(SEQ ID NO: 70)
atggcgaaaaacgttgcgattttcggcttattgttttctcttcttgtgttggttccttctca
gatcttcgcggtgaatcttacgacgcgaacacagttaccacccgcatatacaaatagcttca
ctcggggtgtttattaccccgacaaagtgttcaggtcctccgtgctccactcaacacaggac
ctctttcttcctttcttttctaacgtgacatggtttcatgccattcatgtatccggcactaa
cggtactaagaggttcgataatcctgtgctccctttcaatgacggcgtttactttgcaagca
cagagaagagtaacatcatccgaggttggatctttggcactaccctcgattcaaagacgcag
agcctcctcattgtgaacaatgccactaacgtggtgatcaaagtttgcgagtttcagttctg
caatgaccctttcttgggggtgtactatcataagaacaacaagtcttggatggaatctgaat
tccgcgtctatagcagcgccaacaactgcacctttgaatacgtgtcccagcccttccttatg
gacctggagggaaagcagggaaactttaagaatctgagagagttcgtgtttaaaaatatcga
cggctattttaagatctattctaagcacacgcctattaatctcgtgcgcgatcttccacaag
gcttcagcgccctggaaccactcgtggacctcccaattggtatcaacatcactagatttcag
actctgcttgccctccaccgatcctatctgacacccggagactcctctagcggctggactgc
cggcgctgccgcttattacgttggttatcttcagccacgcacgttcctgctgaagtataacg
agaatggtactattaccgatgccgtggattgtgcccttgaccccctgtccgaaactaagtgc
acactcaagtcattcactgtggaaaaaggaatctaccagacaagcaattttcgggtccagcc
tactgagagcattgtgcgctttcctaacatcacaaatctttgccccttcggagaggttttca
atgctacacggtttgcctccgtgtatgcctggaaccgcaagagaatttccaattgcgtggcc
gattactccgtgctctacaatagtgcaagctttagcacctttaagtgctatggcgtatcccc
tactaagcttaacgacttgtgtttcacaaacgtgtatgccgactcctttgtgatacggggcg
acgaagttagacagatagcaccaggacagacgggaaagatagctgactacaactataagctt
cctgatgacttcactggctgcgttatcgcgtggaattctaacaacctggactcaaaagtcgg
cggcaactataactatctctatcggctgttccgcaagagtaaccttaagccctttgagagag
atataagcactgaaatctaccaggctggcagtacgccctgtaatggcgtggaaggctttaat
tgttattttccactgcaatcctatggttttcagccaaccaatggcgtgggctaccaaccata
ccgcgtcgtggtgctctcctttgaactgctccacgctcccgcgactgtctgcggccccaaga
agtccacgaaccttgtgaagaataagtgcgttaattttaatttcaacggcctcactggaaca
ggagtgctcactgagagtaacaagaagttcctgccatttcaacaatttggcagagacatagc
cgatactactgacgccgttagggacccccagaccctcgagattctcgatataacgccctgct
ccttcggtggagtttccgtgatcacgccaggcaccaataccagtaaccaggtcgccgtgctg
tatcaggatgtcaactgtactgaggtgcccgtagccatccatgcggatcagctcacaccaac
ttggagggtgtacagcaccggctccaatgtattccagactcgggccggatgccttattggcg
ccgaacacgtgaacaatagttacgaatgcgatattccaattggcgccggaatctgtgctagc
taccagactcagacgaactccccaggcagcgccagcagcgttgccagccagtcaatcatcgc
ttatacaatgtcacttggagccgaaaactccgtggcttactcaaacaacagcatcgccatcc
ccacaaacttcaccatatccgtgacaactgagattctgccagtgtccatgactaagacgtcc
gtagattgcactatgtacatatgcggcgacagcacagaatgttctaatctgctgctgcaata
tggaagcttctgcactcaactgaacagagcgctcacaggcatcgccgtggagcaggataaga
atacccaggaggtgttcgcccaagttaagcagatctacaagaccccacccataaaggatttc
ggtggattcaattttagtcagatactcccagacccatctaagccatccaagaggagctttat
cgaggatcttttgtttaacaaagttactctggccgacgccggtttcatcaagcagtacggag
attgcctcggcgacatcgctgctcgtgacctcatctgtgcgcaaaagtttaacggtctgacg
gtgctgcctcccctccttactgatgaaatgatcgcccagtataccagcgcactcctcgctgg
caccataacatccggttggacattcggcgctggtgcagcactgcagataccattcgccatgc
aaatggcatatcgtttcaacggtatcggtgtcacacagaatgtcctatatgagaaccagaag
ctgatcgcaaatcagttcaatagtgccatcggaaaaatccaggatagccttagcagcacagc
ctcagcccttggcaaactccaggatgtcgtgaaccagaatgcccaggctctcaataccctcg
tgaagcagctctcatctaatttcggcgcaatttccagtgtcctcaacgacatcctcagccgc
ctcgacccccccgaggccgaagtgcagattgacagactgattacaggtcgactccagagcct
ccagacttacgtgactcagcagctgataagagccgccgagataagggccagcgctaacctgg
ctgccacaaagatgtctgagtgcgtgctgggccagtccaagagagtagacttctgtggcaaa
ggctaccatctgatgagcttcccacaatccgcacctcacggcgtagtgttcctccacgtgac
atatgtaccggctcaggagaagaatttcactaccgctcctgctatatgccatgatggaaagg
ctcacttcccccgggagggggtgttcgtgtccaacggcacccattggtttgtgactcagcgg
aatttctacgaaccccagatcataaccactgacaacacatttgtgtccggaaattgtgacgt
ggtcattggaatagtgaacaacactgtttatgatccactgcagccagaacttgacagcttta
aggaggagctcgacaagtacttcaagaatcatacgtcaccagatgtggacctcggagatatt
agcggtatcaatgccagtgttgtcaatattcagaaggaaatagaccgccttaatgaggtcgc
caaaaatctgaacgagagcctcatcgatcttcaggagctgggcaaatatgagcagtacatca
agtggccttggtatatttggcttggcttcatcgccggcctgatcgccatagtaatggtcaca
attatgatggccggcctctctttatggatgtgctccaatggatcgttacaatgcagaatttg
catttaa
PDI-Modified S protein with H5i Hemagglutinin CT (V2) DNA
(SEQ ID NO: 71)
atggcgaaaaacgttgcgattttcggcttattgttttctcttcttgtgttggttccttctca
gatcttcgcggtgaatcttacgacgcgaacacagttaccacccgcatatacaaatagcttca
ctcggggtgtttattaccccgacaaagtgttcaggtcctccgtgctccactcaacacaggac
ctctttcttcctttcttttctaacgtgacatggtttcatgccattcatgtatccggcactaa
cggtactaagaggttcgataatcctgtgctccctttcaatgacggcgtttactttgcaagca
cagagaagagtaacatcatccgaggttggatctttggcactaccctcgattcaaagacgcag
agcctcctcattgtgaacaatgccactaacgtggtgatcaaagtttgcgagtttcagttctg
caatgaccctttcttgggggtgtactatcataagaacaacaagtcttggatggaatctgaat
tccgcgtctatagcagcgccaacaactgcacctttgaatacgtgtcccagcccttccttatg
gacctggagggaaagcagggaaactttaagaatctgagagagttcgtgtttaaaaatatcga
cggctattttaagatctattctaagcacacgcctattaatctcgtgcgcgatcttccacaag
gcttcagcgccctggaaccactcgtggacctcccaattggtatcaacatcactagatttcag
actctgcttgccctccaccgatcctatctgacacccggagactcctctagcggctggactgc
cggcgctgccgcttattacgttggttatcttcagccacgcacgttcctgctgaagtataacg
agaatggtactattaccgatgccgtggattgtgcccttgaccccctgtccgaaactaagtgc
acactcaagtcattcactgtggaaaaaggaatctaccagacaagcaattttcgggtccagcc
tactgagagcattgtgcgctttcctaacatcacaaatctttgccccttcggagaggttttca
atgctacacggtttgcctccgtgtatgcctggaaccgcaagagaatttccaattgcgtggcc
gattactccgtgctctacaatagtgcaagctttagcacctttaagtgctatggcgtatcccc
tactaagcttaacgacttgtgtttcacaaacgtgtatgccgactcctttgtgatacggggcg
acgaagttagacagatagcaccaggacagacgggaaagatagctgactacaactataagctt
cctgatgacttcactggctgcgttatcgcgtggaattctaacaacctggactcaaaagtcgg
cggcaactataactatctctatcggctgttccgcaagagtaaccttaagccctttgagagag
atataagcactgaaatctaccaggctggcagtacgccctgtaatggcgtggaaggctttaat
tgttattttccactgcaatcctatggttttcagccaaccaatggcgtgggctaccaaccata
ccgcgtcgtggtgctctcctttgaactgctccacgctcccgcgactgtctgcggccccaaga
agtccacgaaccttgtgaagaataagtgcgttaattttaatttcaacggcctcactggaaca
ggagtgctcactgagagtaacaagaagttcctgccatttcaacaatttggcagagacatagc
cgatactactgacgccgttagggacccccagaccctcgagattctcgatataacgccctgct
ccttcggtggagtttccgtgatcacgccaggcaccaataccagtaaccaggtcgccgtgctg
tatcaggatgtcaactgtactgaggtgcccgtagccatccatgcggatcagctcacaccaac
ttggagggtgtacagcaccggctccaatgtattccagactcgggccggatgccttattggcg
ccgaacacgtgaacaatagttacgaatgcgatattccaattggcgccggaatctgtgctagc
taccagactcagacgaactccccaggcagcgccagcagcgttgccagccagtcaatcatcgc
ttatacaatgtcacttggagccgaaaactccgtggcttactcaaacaacagcatcgccatcc
ccacaaacttcaccatatccgtgacaactgagattctgccagtgtccatgactaagacgtcc
gtagattgcactatgtacatatgcggcgacagcacagaatgttctaatctgctgctgcaata
tggaagcttctgcactcaactgaacagagcgctcacaggcatcgccgtggagcaggataaga
atacccaggaggtgttcgcccaagttaagcagatctacaagaccccacccataaaggatttc
ggtggattcaattttagtcagatactcccagacccatctaagccatccaagaggagctttat
cgaggatcttttgtttaacaaagttactctggccgacgccggtttcatcaagcagtacggag
attgcctcggcgacatcgctgctcgtgacctcatctgtgcgcaaaagtttaacggtctgacg
gtgctgcctcccctccttactgatgaaatgatcgcccagtataccagcgcactcctcgctgg
caccataacatccggttggacattcggcgctggtgcagcactgcagataccattcgccatgc
aaatggcatatcgtttcaacggtatcggtgtcacacagaatgtcctatatgagaaccagaag
ctgatcgcaaatcagttcaatagtgccatcggaaaaatccaggatagccttagcagcacagc
ctcagcccttggcaaactccaggatgtcgtgaaccagaatgcccaggctctcaataccctcg
tgaagcagctctcatctaatttcggcgcaatttccagtgtcctcaacgacatcctcagccgc
ctcgacccccccgaggccgaagtgcagattgacagactgattacaggtcgactccagagcct
ccagacttacgtgactcagcagctgataagagccgccgagataagggccagcgctaacctgg
ctgccacaaagatgtctgagtgcgtgctgggccagtccaagagagtagacttctgtggcaaa
ggctaccatctgatgagcttcccacaatccgcacctcacggcgtagtgttcctccacgtgac
atatgtaccggctcaggagaagaatttcactaccgctcctgctatatgccatgatggaaagg
ctcacttcccccgggagggggtgttcgtgtccaacggcacccattggtttgtgactcagcgg
aatttctacgaaccccagatcataaccactgacaacacatttgtgtccggaaattgtgacgt
ggtcattggaatagtgaacaacactgtttatgatccactgcagccagaacttgacagcttta
aggaggagctcgacaagtacttcaagaatcatacgtcaccagatgtggacctcggagatatt
agcggtatcaatgccagtgttgtcaatattcagaaggaaatagaccgccttaatgaggtcgc
caaaaatctgaacgagagcctcatcgatcttcaggagctgggcaaatatgagcagtacatca
agtggccttggtatatttggcttggcttcatcgccggcctgatcgccatagtaatggtcaca
attatggccggcctctctttatggatgtgctccaatggatcgttacaatgcagaatttgcat
ttaa
PDI-Modified S protein with H5i Hemagglutinin CT (V3) DNA
(SEQ ID NO: 72)
atggcgaaaaacgttgcgattttcggcttattgttttctcttcttgtgttggttccttctca
gatcttcgcggtgaatcttacgacgcgaacacagttaccacccgcatatacaaatagcttca
ctcggggtgtttattaccccgacaaagtgttcaggtcctccgtgctccactcaacacaggac
ctctttcttcctttcttttctaacgtgacatggtttcatgccattcatgtatccggcactaa
cggtactaagaggttcgataatcctgtgctccctttcaatgacggcgtttactttgcaagca
cagagaagagtaacatcatccgaggttggatctttggcactaccctcgattcaaagacgcag
agcctcctcattgtgaacaatgccactaacgtggtgatcaaagtttgcgagtttcagttctg
caatgaccctttcttgggggtgtactatcataagaacaacaagtcttggatggaatctgaat
tccgcgtctatagcagcgccaacaactgcacctttgaatacgtgtcccagcccttccttatg
gacctggagggaaagcagggaaactttaagaatctgagagagttcgtgtttaaaaatatcga
cggctattttaagatctattctaagcacacgcctattaatctcgtgcgcgatcttccacaag
gcttcagcgccctggaaccactcgtggacctcccaattggtatcaacatcactagatttcag
actctgcttgccctccaccgatcctatctgacacccggagactcctctagcggctggactgc
cggcgctgccgcttattacgttggttatcttcagccacgcacgttcctgctgaagtataacg
agaatggtactattaccgatgccgtggattgtgcccttgaccccctgtccgaaactaagtgc
acactcaagtcattcactgtggaaaaaggaatctaccagacaagcaattttcgggtccagcc
tactgagagcattgtgcgctttcctaacatcacaaatctttgccccttcggagaggttttca
atgctacacggtttgcctccgtgtatgcctggaaccgcaagagaatttccaattgcgtggcc
gattactccgtgctctacaatagtgcaagctttagcacctttaagtgctatggcgtatcccc
tactaagcttaacgacttgtgtttcacaaacgtgtatgccgactcctttgtgatacggggcg
acgaagttagacagatagcaccaggacagacgggaaagatagctgactacaactataagctt
cctgatgacttcactggctgcgttatcgcgtggaattctaacaacctggactcaaaagtcgg
cggcaactataactatctctatcggctgttccgcaagagtaaccttaagccctttgagagag
atataagcactgaaatctaccaggctggcagtacgccctgtaatggcgtggaaggctttaat
tgttattttccactgcaatcctatggttttcagccaaccaatggcgtgggctaccaaccata
ccgcgtcgtggtgctctcctttgaactgctccacgctcccgcgactgtctgcggccccaaga
agtccacgaaccttgtgaagaataagtgcgttaattttaatttcaacggcctcactggaaca
ggagtgctcactgagagtaacaagaagttcctgccatttcaacaatttggcagagacatagc
cgatactactgacgccgttagggacccccagaccctcgagattctcgatataacgccctgct
ccttcggtggagtttccgtgatcacgccaggcaccaataccagtaaccaggtcgccgtgctg
tatcaggatgtcaactgtactgaggtgcccgtagccatccatgcggatcagctcacaccaac
ttggagggtgtacagcaccggctccaatgtattccagactcgggccggatgccttattggcg
ccgaacacgtgaacaatagttacgaatgcgatattccaattggcgccggaatctgtgctagc
taccagactcagacgaactccccaggcagcgccagcagcgttgccagccagtcaatcatcgc
ttatacaatgtcacttggagccgaaaactccgtggcttactcaaacaacagcatcgccatcc
ccacaaacttcaccatatccgtgacaactgagattctgccagtgtccatgactaagacgtcc
gtagattgcactatgtacatatgcggcgacagcacagaatgttctaatctgctgctgcaata
tggaagcttctgcactcaactgaacagagcgctcacaggcatcgccgtggagcaggataaga
atacccaggaggtgttcgcccaagttaagcagatctacaagaccccacccataaaggatttc
ggtggattcaattttagtcagatactcccagacccatctaagccatccaagaggagctttat
cgaggatcttttgtttaacaaagttactctggccgacgccggtttcatcaagcagtacggag
attgcctcggcgacatcgctgctcgtgacctcatctgtgcgcaaaagtttaacggtctgacg
gtgctgcctcccctccttactgatgaaatgatcgcccagtataccagcgcactcctcgctgg
caccataacatccggttggacattcggcgctggtgcagcactgcagataccattcgccatgc
aaatggcatatcgtttcaacggtatcggtgtcacacagaatgtcctatatgagaaccagaag
ctgatcgcaaatcagttcaatagtgccatcggaaaaatccaggatagccttagcagcacagc
ctcagcccttggcaaactccaggatgtcgtgaaccagaatgcccaggctctcaataccctcg
tgaagcagctctcatctaatttcggcgcaatttccagtgtcctcaacgacatcctcagccgc
ctcgacccccccgaggccgaagtgcagattgacagactgattacaggtcgactccagagcct
ccagacttacgtgactcagcagctgataagagccgccgagataagggccagcgctaacctgg
ctgccacaaagatgtctgagtgcgtgctgggccagtccaagagagtagacttctgtggcaaa
ggctaccatctgatgagcttcccacaatccgcacctcacggcgtagtgttcctccacgtgac
atatgtaccggctcaggagaagaatttcactaccgctcctgctatatgccatgatggaaagg
ctcacttcccccgggagggggtgttcgtgtccaacggcacccattggtttgtgactcagcgg
aatttctacgaaccccagatcataaccactgacaacacatttgtgtccggaaattgtgacgt
ggtcattggaatagtgaacaacactgtttatgatccactgcagccagaacttgacagcttta
aggaggagctcgacaagtacttcaagaatcatacgtcaccagatgtggacctcggagatatt
agcggtatcaatgccagtgttgtcaatattcagaaggaaatagaccgccttaatgaggtcgc
caaaaatctgaacgagagcctcatcgatcttcaggagctgggcaaatatgagcagtacatca
agtggccttggtatatttggcttggcttcatcgccggcctgatcgccatagtaatggtcaca
attatgctctgctgcatgtgctccaatggatcgttacaatgcagaatttgcatttaa
PDI-Modified S protein with H5i Hemagglutinin CT (V4) DNA
(SEQ ID NO: 73)
atggcgaaaaacgttgcgattttcggcttattgttttctcttcttgtgttggttccttctca
gatcttcgcggtgaatcttacgacgcgaacacagttaccacccgcatatacaaatagcttca
ctcggggtgtttattaccccgacaaagtgttcaggtcctccgtgctccactcaacacaggac
ctctttcttcctttcttttctaacgtgacatggtttcatgccattcatgtatccggcactaa
cggtactaagaggttcgataatcctgtgctccctttcaatgacggcgtttactttgcaagca
cagagaagagtaacatcatccgaggttggatctttggcactaccctcgattcaaagacgcag
agcctcctcattgtgaacaatgccactaacgtggtgatcaaagtttgcgagtttcagttctg
caatgaccctttcttgggggtgtactatcataagaacaacaagtcttggatggaatctgaat
tccgcgtctatagcagcgccaacaactgcacctttgaatacgtgtcccagcccttccttatg
gacctggagggaaagcagggaaactttaagaatctgagagagttcgtgtttaaaaatatcga
cggctattttaagatctattctaagcacacgcctattaatctcgtgcgcgatcttccacaag
gcttcagcgccctggaaccactcgtggacctcccaattggtatcaacatcactagatttcag
actctgcttgccctccaccgatcctatctgacacccggagactcctctagcggctggactgc
cggcgctgccgcttattacgttggttatcttcagccacgcacgttcctgctgaagtataacg
agaatggtactattaccgatgccgtggattgtgcccttgaccccctgtccgaaactaagtgc
acactcaagtcattcactgtggaaaaaggaatctaccagacaagcaattttcgggtccagcc
tactgagagcattgtgcgctttcctaacatcacaaatctttgccccttcggagaggttttca
atgctacacggtttgcctccgtgtatgcctggaaccgcaagagaatttccaattgcgtggcc
gattactccgtgctctacaatagtgcaagctttagcacctttaagtgctatggcgtatcccc
tactaagcttaacgacttgtgtttcacaaacgtgtatgccgactcctttgtgatacggggcg
acgaagttagacagatagcaccaggacagacgggaaagatagctgactacaactataagctt
cctgatgacttcactggctgcgttatcgcgtggaattctaacaacctggactcaaaagtcgg
cggcaactataactatctctatcggctgttccgcaagagtaaccttaagccctttgagagag
atataagcactgaaatctaccaggctggcagtacgccctgtaatggcgtggaaggctttaat
tgttattttccactgcaatcctatggttttcagccaaccaatggcgtgggctaccaaccata
ccgcgtcgtggtgctctcctttgaactgctccacgctcccgcgactgtctgcggccccaaga
agtccacgaaccttgtgaagaataagtgcgttaattttaatttcaacggcctcactggaaca
ggagtgctcactgagagtaacaagaagttcctgccatttcaacaatttggcagagacatagc
cgatactactgacgccgttagggacccccagaccctcgagattctcgatataacgccctgct
ccttcggtggagtttccgtgatcacgccaggcaccaataccagtaaccaggtcgccgtgctg
tatcaggatgtcaactgtactgaggtgcccgtagccatccatgcggatcagctcacaccaac
ttggagggtgtacagcaccggctccaatgtattccagactcgggccggatgccttattggcg
ccgaacacgtgaacaatagttacgaatgcgatattccaattggcgccggaatctgtgctagc
taccagactcagacgaactccccaggcagcgccagcagcgttgccagccagtcaatcatcgc
ttatacaatgtcacttggagccgaaaactccgtggcttactcaaacaacagcatcgccatcc
ccacaaacttcaccatatccgtgacaactgagattctgccagtgtccatgactaagacgtcc
gtagattgcactatgtacatatgcggcgacagcacagaatgttctaatctgctgctgcaata
tggaagcttctgcactcaactgaacagagcgctcacaggcatcgccgtggagcaggataaga
atacccaggaggtgttcgcccaagttaagcagatctacaagaccccacccataaaggatttc
ggtggattcaattttagtcagatactcccagacccatctaagccatccaagaggagctttat
cgaggatcttttgtttaacaaagttactctggccgacgccggtttcatcaagcagtacggag
attgcctcggcgacatcgctgctcgtgacctcatctgtgcgcaaaagtttaacggtctgacg
gtgctgcctcccctccttactgatgaaatgatcgcccagtataccagcgcactcctcgctgg
caccataacatccggttggacattcggcgctggtgcagcactgcagataccattcgccatgc
aaatggcatatcgtttcaacggtatcggtgtcacacagaatgtcctatatgagaaccagaag
ctgatcgcaaatcagttcaatagtgccatcggaaaaatccaggatagccttagcagcacagc
ctcagcccttggcaaactccaggatgtcgtgaaccagaatgcccaggctctcaataccctcg
tgaagcagctctcatctaatttcggcgcaatttccagtgtcctcaacgacatcctcagccgc
ctcgacccccccgaggccgaagtgcagattgacagactgattacaggtcgactccagagcct
ccagacttacgtgactcagcagctgataagagccgccgagataagggccagcgctaacctgg
ctgccacaaagatgtctgagtgcgtgctgggccagtccaagagagtagacttctgtggcaaa
ggctaccatctgatgagcttcccacaatccgcacctcacggcgtagtgttcctccacgtgac
atatgtaccggctcaggagaagaatttcactaccgctcctgctatatgccatgatggaaagg
ctcacttcccccggggggggtgcttcgtgtccaacggcacccattggtttgtgactcagcgg
aatttctacgaaccccagatcataaccactgacaacacatttgtgtccggaaattgtgacgt
ggtcattggaatagtgaacaacactgtttatgatccactgcagccagaacttgacagcttta
aggaggagctcgacaagtacttcaagaatcatacgtcaccagatgtggacctcggagatatt
agcggtatcaatgccagtgttgtcaatattcagaaggaaatagaccgccttaatgaggtcgc
caaaaatctgaacgagagcctcatcgatcttcaggagctgggcaaatatgagcagtacatca
agtggccttggtatatttggcttggcttcatcgccggcctgatcgccatagtaatggtcaca
attatgctctgctgctccaatggatcgttacaatgcagaatttgcatttaa
PDI-S-protein + H1 Cal DNA
(SEQ ID NO: 74)
atggcgaaaaacgttgcgattttcggcttattgttttctcttcttgtgttggttccttctca
gatcttcgcggtgaatcttacgacgcgaacacagttaccacccgcatatacaaatagcttca
ctcggggtgtttattaccccgacaaagtgttcaggtcctccgtgctccactcaacacaggac
ctctttcttcctttcttttctaacgtgacatggtttcatgccattcatgtatccggcactaa
cggtactaagaggttcgataatcctgtgctccctttcaatgacggcgtttactttgcaagca
cagagaagagtaacatcatccgaggttggatctttggcactaccctcgattcaaagacgcag
agcctcctcattgtgaacaatgccactaacgtggtgatcaaagtttgcgagtttcagttctg
caatgaccctttcttgggggtgtactatcataagaacaacaagtcttggatggaatctgaat
tccgcgtctatagcagcgccaacaactgcacctttgaatacgtgtcccagcccttccttatg
gacctggagggaaagcagggaaactttaagaatctgagagagttcgtgtttaaaaatatcga
cggctattttaagatctattctaagcacacgcctattaatctcgtgcgcgatcttccacaag
gcttcagcgccctggaaccactcgtggacctcccaattggtatcaacatcactagatttcag
actctgcttgccctccaccgatcctatctgacacccggagactcctctagcggctggactgc
cggcgctgccgcttattacgttggttatcttcagccacgcacgttcctgctgaagtataacg
agaatggtactattaccgatgccgtggattgtgcccttgaccccctgtccgaaactaagtgc
acactcaagtcattcactgtggaaaaaggaatctaccagacaagcaattttcgggtccagcc
tactgagagcattgtgcgctttcctaacatcacaaatctttgccccttcggagaggttttca
atgctacacggtttgcctccgtgtatgcctggaaccgcaagagaatttccaattgcgtggcc
gattactccgtgctctacaatagtgcaagctttagcacctttaagtgctatggcgtatcccc
tactaagcttaacgacttgtgtttcacaaacgtgtatgccgactcctttgtgatacggggcg
acgaagttagacagatagcaccaggacagacgggaaagatagctgactacaactataagctt
cctgatgacttcactggctgcgttatcgcgtggaattctaacaacctggactcaaaagtcgg
cggcaactataactatctctatcggctgttccgcaagagtaaccttaagccctttgagagag
atataagcactgaaatctaccaggctggcagtacgccctgtaatggcgtggaaggctttaat
tgttattttccactgcaatcctatggttttcagccaaccaatggcgtgggctaccaaccata
ccgcgtcgtggtgctctcctttgaactgctccacgctcccgcgactgtctgcggccccaaga
agtccacgaaccttgtgaagaataagtgcgttaattttaatttcaacggcctcactggaaca
ggagtgctcactgagagtaacaagaagttcctgccatttcaacaatttggcagagacatagc
cgatactactgacgccgttagggacccccagaccctcgagattctcgatataacgccctgct
ccttcggtggagtttccgtgatcacgccaggcaccaataccagtaaccaggtcgccgtgctg
tatcaggatgtcaactgtactgaggtgcccgtagccatccatgcggatcagctcacaccaac
ttggagggtgtacagcaccggctccaatgtattccagactcgggccggatgccttattggcg
ccgaacacgtgaacaatagttacgaatgcgatattccaattggcgccggaatctgtgctagc
taccagactcagacgaactccccaggcagcgccagcagcgttgccagccagtcaatcatcgc
ttatacaatgtcacttggagccgaaaactccgtggcttactcaaacaacagcatcgccatcc
ccacaaacttcaccatatccgtgacaactgagattctgccagtgtccatgactaagacgtcc
gtagattgcactatgtacatatgcggcgacagcacagaatgttctaatctgctgctgcaata
tggaagcttctgcactcaactgaacagagcgctcacaggcatcgccgtggagcaggataaga
atacccaggaggtgttcgcccaagttaagcagatctacaagaccccacccataaaggatttc
ggtggattcaattttagtcagatactcccagacccatctaagccatccaagaggagctttat
cgaggatcttttgtttaacaaagttactctggccgacgccggtttcatcaagcagtacggag
attgcctcggcgacatcgctgctcgtgacctcatctgtgcgcaaaagtttaacggtctgacg
gtgctgcctcccctccttactgatgaaatgatcgcccagtataccagcgcactcctcgctgg
caccataacatccggttggacattcggcgctggtgcagcactgcagataccattcgccatgc
aaatggcatatcgtttcaacggtatcggtgtcacacagaatgtcctatatgagaaccagaag
ctgatcgcaaatcagttcaatagtgccatcggaaaaatccaggatagccttagcagcacagc
ctcagcccttggcaaactccaggatgtcgtgaaccagaatgcccaggctctcaataccctcg
tgaagcagctctcatctaatttcggcgcaatttccagtgtcctcaacgacatcctcagccgc
ctcgacccccccgaggccgaagtgcagattgacagactgattacaggtcgactccagagcct
ccagacttacgtgactcagcagctgataagagccgccgagataagggccagcgctaacctgg
ctgccacaaagatgtctgagtgcgtgctgggccagtccaagagagtagacttctgtggcaaa
ggctaccatctgatgagcttcccacaatccgcacctcacggcgtagtgttcctccacgtgac
atatgtaccggctcaggagaagaatttcactaccgctcctgctatatgccatgatggaaagg
ctcacttcccccgggagggggtgttcgtgtccaacggcacccattggtttgtgactcagcgg
aatttctacgaaccccagatcataaccactgacaacacatttgtgtccggaaattgtgacgt
ggtcattggaatagtgaacaacactgtttatgatccactgcagccagaacttgacagcttta
aggaggagctcgacaagtacttcaagaatcatacgtcaccagatgtggacctcggagatatt
agcggtatcaatgccagtgttgtcaatattcagaaggaaatagaccgccttaatgaggtcgc
caaaaatctgaacgagagcctcatcgatcttcaggagctgggcaaatatgagcagtacatca
agtggccttggtatatttggcttggcttcatcgccggcctgatcgccatagtaatggtcaca
attatgctcagcttctggatgtgctctaatgggtctctacagtgtagaatatgtatttaa
PDI-S-protein + H3 Minn DNA
(SEQ ID NO: 75)
atggcgaaaaacgttgcgattttcggcttattgttttctcttcttgtgttggttccttctca
gatcttcgcggtgaatcttacgacgcgaacacagttaccacccgcatatacaaatagcttca
ctcggggtgtttattaccccgacaaagtgttcaggtcctccgtgctccactcaacacaggac
ctctttcttcctttcttttctaacgtgacatggtttcatgccattcatgtatccggcactaa
cggtactaagaggttcgataatcctgtgctccctttcaatgacggcgtttactttgcaagca
cagagaagagtaacatcatccgaggttggatctttggcactaccctcgattcaaagacgcag
agcctcctcattgtgaacaatgccactaacgtggtgatcaaagtttgcgagtttcagttctg
caatgaccctttcttgggggtgtactatcataagaacaacaagtcttggatggaatctgaat
tccgcgtctatagcagcgccaacaactgcacctttgaatacgtgtcccagcccttccttatg
gacctggagggaaagcagggaaactttaagaatctgagagagttcgtgtttaaaaatatcga
cggctattttaagatctattctaagcacacgcctattaatctcgtgcgcgatcttccacaag
gcttcagcgccctggaaccactcgtggacctcccaattggtatcaacatcactagatttcag
actctgcttgccctccaccgatcctatctgacacccggagactcctctagcggctggactgc
cggcgctgccgcttattacgttggttatcttcagccacgcacgttcctgctgaagtataacg
agaatggtactattaccgatgccgtggattgtgcccttgaccccctgtccgaaactaagtgc
acactcaagtcattcactgtggaaaaaggaatctaccagacaagcaattttcgggtccagcc
tactgagagcattgtgcgctttcctaacatcacaaatctttgccccttcggagaggttttca
atgctacacggtttgcctccgtgtatgcctggaaccgcaagagaatttccaattgcgtggcc
gattactccgtgctctacaatagtgcaagctttagcacctttaagtgctatggcgtatcccc
tactaagcttaacgacttgtgtttcacaaacgtgtatgccgactcctttgtgatacggggcg
acgaagttagacagatagcaccaggacagacgggaaagatagctgactacaactataagctt
cctgatgacttcactggctgcgttatcgcgtggaattctaacaacctggactcaaaagtcgg
cggcaactataactatctctatcggctgttccgcaagagtaaccttaagccctttgagagag
atataagcactgaaatctaccaggctggcagtacgccctgtaatggcgtggaaggctttaat
tgttattttccactgcaatcctatggttttcagccaaccaatggcgtgggctaccaaccata
ccgcgtcgtggtgctctcctttgaactgctccacgctcccgcgactgtctgcggccccaaga
agtccacgaaccttgtgaagaataagtgcgttaattttaatttcaacggcctcactggaaca
ggagtgctcactgagagtaacaagaagttcctgccatttcaacaatttggcagagacatagc
cgatactactgacgccgttagggacccccagaccctcgagattctcgatataacgccctgct
ccttcggtggagtttccgtgatcacgccaggcaccaataccagtaaccaggtcgccgtgctg
tatcaggatgtcaactgtactgaggtgcccgtagccatccatgcggatcagctcacaccaac
ttggagggtgtacagcaccggctccaatgtattccagactcgggccggatgccttattggcg
ccgaacacgtgaacaatagttacgaatgcgatattccaattggcgccggaatctgtgctagc
taccagactcagacgaactccccaggcagcgccagcagcgttgccagccagtcaatcatcgc
ttatacaatgtcacttggagccgaaaactccgtggcttactcaaacaacagcatcgccatcc
ccacaaacttcaccatatccgtgacaactgagattctgccagtgtccatgactaagacgtcc
gtagattgcactatgtacatatgcggcgacagcacagaatgttctaatctgctgctgcaata
tggaagcttctgcactcaactgaacagagcgctcacaggcatcgccgtggagcaggataaga
atacccaggaggtgttcgcccaagttaagcagatctacaagaccccacccataaaggatttc
ggtggattcaattttagtcagatactcccagacccatctaagccatccaagaggagctttat
cgaggatcttttgtttaacaaagttactctggccgacgccggtttcatcaagcagtacggag
attgcctcggcgacatcgctgctcgtgacctcatctgtgcgcaaaagtttaacggtctgacg
gtgctgcctcccctccttactgatgaaatgatcgcccagtataccagcgcactcctcgctgg
caccataacatccggttggacattcggcgctggtgcagcactgcagataccattcgccatgc
aaatggcatatcgtttcaacggtatcggtgtcacacagaatgtcctatatgagaaccagaag
ctgatcgcaaatcagttcaatagtgccatcggaaaaatccaggatagccttagcagcacagc
ctcagcccttggcaaactccaggatgtcgtgaaccagaatgcccaggctctcaataccctcg
tgaagcagctctcatctaatttcggcgcaatttccagtgtcctcaacgacatcctcagccgc
ctcgacccccccgaggccgaagtgcagattgacagactgattacaggtcgactccagagcct
ccagacttacgtgactcagcagctgataagagccgccgagataagggccagcgctaacctgg
ctgccacaaagatgtctgagtgcgtgctgggccagtccaagagagtagacttctgtggcaaa
ggctaccatctgatgagcttcccacaatccgcacctcacggcgtagtgttcctccacgtgac
atatgtaccggctcaggagaagaatttcactaccgctcctgctatatgccatgatggaaagg
ctcacttcccccgggagggggtgttcgtgtccaacggcacccattggtttgtgactcagcgg
aatttctacgaaccccagatcataaccactgacaacacatttgtgtccggaaattgtgacgt
ggtcattggaatagtgaacaacactgtttatgatccactgcagccagaacttgacagcttta
aggaggagctcgacaagtacttcaagaatcatacgtcaccagatgtggacctcggagatatt
agcggtatcaatgccagtgttgtcaatattcagaaggaaatagaccgccttaatgaggtcgc
caaaaatctgaacgagagcctcatcgatcttcaggagctgggcaaatatgagcagtacatca
agtggccttggtatatttggcttggcttcatcgccggcctgatcgccatagtaatggtcaca
attatgctcatgtgggcctgtcagaagggcaacatcagatgcaacatctgcatctaa
PDI-S-protein + H6 HK DNA
(SEQ ID NO: 76)
atggcgaaaaacgttgcgattttcggcttattgttttctcttcttgtgttggttccttctca
gatcttcgcggtgaatcttacgacgcgaacacagttaccacccgcatatacaaatagcttca
ctcggggtgtttattaccccgacaaagtgttcaggtcctccgtgctccactcaacacaggac
ctctttcttcctttcttttctaacgtgacatggtttcatgccattcatgtatccggcactaa
cggtactaagaggttcgataatcctgtgctccctttcaatgacggcgtttactttgcaagca
cagagaagagtaacatcatccgaggttggatctttggcactaccctcgattcaaagacgcag
agcctcctcattgtgaacaatgccactaacgtggtgatcaaagtttgcgagtttcagttctg
caatgaccctttcttgggggtgtactatcataagaacaacaagtcttggatggaatctgaat
tccgcgtctatagcagcgccaacaactgcacctttgaatacgtgtcccagcccttccttatg
gacctggagggaaagcagggaaactttaagaatctgagagagttcgtgtttaaaaatatcga
cggctattttaagatctattctaagcacacgcctattaatctcgtgcgcgatcttccacaag
gcttcagcgccctggaaccactcgtggacctcccaattggtatcaacatcactagatttcag
actctgcttgccctccaccgatcctatctgacacccggagactcctctagcggctggactgc
cggcgctgccgcttattacgttggttatcttcagccacgcacgttcctgctgaagtataacg
agaatggtactattaccgatgccgtggattgtgcccttgaccccctgtccgaaactaagtgc
acactcaagtcattcactgtggaaaaaggaatctaccagacaagcaattttcgggtccagcc
tactgagagcattgtgcgctttcctaacatcacaaatctttgccccttcggagaggttttca
atgctacacggtttgcctccgtgtatgcctggaaccgcaagagaatttccaattgcgtggcc
gattactccgtgctctacaatagtgcaagctttagcacctttaagtgctatggcgtatcccc
tactaagcttaacgacttgtgtttcacaaacgtgtatgccgactcctttgtgatacggggcg
acgaagttagacagatagcaccaggacagacgggaaagatagctgactacaactataagctt
cctgatgacttcactggctgcgttatcgcgtggaattctaacaacctggactcaaaagtcgg
cggcaactataactatctctatcggctgttccgcaagagtaaccttaagccctttgagagag
atataagcactgaaatctaccaggctggcagtacgccctgtaatggcgtggaaggctttaat
tgttattttccactgcaatcctatggttttcagccaaccaatggcgtgggctaccaaccata
ccgcgtcgtggtgctctcctttgaactgctccacgctcccgcgactgtctgcggccccaaga
agtccacgaaccttgtgaagaataagtgcgttaattttaatttcaacggcctcactggaaca
ggagtgctcactgagagtaacaagaagttcctgccatttcaacaatttggcagagacatagc
cgatactactgacgccgttagggacccccagaccctcgagattctcgatataacgccctgct
ccttcggtggagtttccgtgatcacgccaggcaccaataccagtaaccaggtcgccgtgctg
tatcaggatgtcaactgtactgaggtgcccgtagccatccatgcggatcagctcacaccaac
ttggagggtgtacagcaccggctccaatgtattccagactcgggccggatgccttattggcg
ccgaacacgtgaacaatagttacgaatgcgatattccaattggcgccggaatctgtgctagc
taccagactcagacgaactccccaggcagcgccagcagcgttgccagccagtcaatcatcgc
ttatacaatgtcacttggagccgaaaactccgtggcttactcaaacaacagcatcgccatcc
ccacaaacttcaccatatccgtgacaactgagattctgccagtgtccatgactaagacgtcc
gtagattgcactatgtacatatgcggcgacagcacagaatgttctaatctgctgctgcaata
tggaagcttctgcactcaactgaacagagcgctcacaggcatcgccgtggagcaggataaga
atacccaggaggtgttcgcccaagttaagcagatctacaagaccccacccataaaggatttc
ggtggattcaattttagtcagatactcccagacccatctaagccatccaagaggagctttat
cgaggatcttttgtttaacaaagttactctggccgacgccggtttcatcaagcagtacggag
attgcctcggcgacatcgctgctcgtgacctcatctgtgcgcaaaagtttaacggtctgacg
gtgctgcctcccctccttactgatgaaatgatcgcccagtataccagcgcactcctcgctgg
caccataacatccggttggacattcggcgctggtgcagcactgcagataccattcgccatgc
aaatggcatatcgtttcaacggtatcggtgtcacacagaatgtcctatatgagaaccagaag
ctgatcgcaaatcagttcaatagtgccatcggaaaaatccaggatagccttagcagcacagc
ctcagcccttggcaaactccaggatgtcgtgaaccagaatgcccaggctctcaataccctcg
tgaagcagctctcatctaatttcggcgcaatttccagtgtcctcaacgacatcctcagccgc
ctcgacccccccgaggccgaagtgcagattgacagactgattacaggtcgactccagagcct
ccagacttacgtgactcagcagctgataagagccgccgagataagggccagcgctaacctgg
ctgccacaaagatgtctgagtgcgtgctgggccagtccaagagagtagacttctgtggcaaa
ggctaccatctgatgagcttcccacaatccgcacctcacggcgtagtgttcctccacgtgac
atatgtaccggctcaggagaagaatttcactaccgctcctgctatatgccatgatggaaagg
ctcacttcccccgggagggggtgttcgtgtccaacggcacccattggtttgtgactcagcgg
aatttctacgaaccccagatcataaccactgacaacacatttgtgtccggaaattgtgacgt
ggtcattggaatagtgaacaacactgtttatgatccactgcagccagaacttgacagcttta
aggaggagctcgacaagtacttcaagaatcatacgtcaccagatgtggacctcggagatatt
agcggtatcaatgccagtgttgtcaatattcagaaggaaatagaccgccttaatgaggtcgc
caaaaatctgaacgagagcctcatcgatcttcaggagctgggcaaatatgagcagtacatca
agtggccttggtatatttggcttggcttcatcgccggcctgatcgccatagtaatggtcaca
attatgctcggtctttggatgtgttcaaatggttcaatgcagtgcaggatatgtatataa
PDI-S-protein + H7 Guangdong DNA
(SEQ ID NO: 77)
atggcgaaaaacgttgcgattttcggcttattgttttctcttcttgtgttggttccttctca
gatcttcgcggtgaatcttacgacgcgaacacagttaccacccgcatatacaaatagcttca
ctcggggtgtttattaccccgacaaagtgttcaggtcctccgtgctccactcaacacaggac
ctctttcttcctttcttttctaacgtgacatggtttcatgccattcatgtatccggcactaa
cggtactaagaggttcgataatcctgtgctccctttcaatgacggcgtttactttgcaagca
cagagaagagtaacatcatccgaggttggatctttggcactaccctcgattcaaagacgcag
agcctcctcattgtgaacaatgccactaacgtggtgatcaaagtttgcgagtttcagttctg
caatgaccctttcttgggggtgtactatcataagaacaacaagtcttggatggaatctgaat
tccgcgtctatagcagcgccaacaactgcacctttgaatacgtgtcccagcccttccttatg
gacctggagggaaagcagggaaactttaagaatctgagagagttcgtgtttaaaaatatcga
cggctattttaagatctattctaagcacacgcctattaatctcgtgcgcgatcttccacaag
gcttcagcgccctggaaccactcgtggacctcccaattggtatcaacatcactagatttcag
actctgcttgccctccaccgatcctatctgacacccggagactcctctagcggctggactgc
cggcgctgccgcttattacgttggttatcttcagccacgcacgttcctgctgaagtataacg
agaatggtactattaccgatgccgtggattgtgcccttgaccccctgtccgaaactaagtgc
acactcaagtcattcactgtggaaaaaggaatctaccagacaagcaattttcgggtccagcc
tactgagagcattgtgcgctttcctaacatcacaaatctttgccccttcggagaggttttca
atgctacacggtttgcctccgtgtatgcctggaaccgcaagagaatttccaattgcgtggcc
gattactccgtgctctacaatagtgcaagctttagcacctttaagtgctatggcgtatcccc
tactaagcttaacgacttgtgtttcacaaacgtgtatgccgactcctttgtgatacggggcg
acgaagttagacagatagcaccaggacagacgggaaagatagctgactacaactataagctt
cctgatgacttcactggctgcgttatcgcgtggaattctaacaacctggactcaaaagtcgg
cggcaactataactatctctatcggctgttccgcaagagtaaccttaagccctttgagagag
atataagcactgaaatctaccaggctggcagtacgccctgtaatggcgtggaaggctttaat
tgttattttccactgcaatcctatggttttcagccaaccaatggcgtgggctaccaaccata
ccgcgtcgtggtgctctcctttgaactgctccacgctcccgcgactgtctgcggccccaaga
agtccacgaaccttgtgaagaataagtgcgttaattttaatttcaacggcctcactggaaca
ggagtgctcactgagagtaacaagaagttcctgccatttcaacaatttggcagagacatagc
cgatactactgacgccgttagggacccccagaccctcgagattctcgatataacgccctgct
ccttcggtggagtttccgtgatcacgccaggcaccaataccagtaaccaggtcgccgtgctg
tatcaggatgtcaactgtactgaggtgcccgtagccatccatgcggatcagctcacaccaac
ttggagggtgtacagcaccggctccaatgtattccagactcgggccggatgccttattggcg
ccgaacacgtgaacaatagttacgaatgcgatattccaattggcgccggaatctgtgctagc
taccagactcagacgaactccccaggcagcgccagcagcgttgccagccagtcaatcatcgc
ttatacaatgtcacttggagccgaaaactccgtggcttactcaaacaacagcatcgccatcc
ccacaaacttcaccatatccgtgacaactgagattctgccagtgtccatgactaagacgtcc
gtagattgcactatgtacatatgcggcgacagcacagaatgttctaatctgctgctgcaata
tggaagcttctgcactcaactgaacagagcgctcacaggcatcgccgtggagcaggataaga
atacccaggaggtgttcgcccaagttaagcagatctacaagaccccacccataaaggatttc
ggtggattcaattttagtcagatactcccagacccatctaagccatccaagaggagctttat
cgaggatcttttgtttaacaaagttactctggccgacgccggtttcatcaagcagtacggag
attgcctcggcgacatcgctgctcgtgacctcatctgtgcgcaaaagtttaacggtctgacg
gtgctgcctcccctccttactgatgaaatgatcgcccagtataccagcgcactcctcgctgg
caccataacatccggttggacattcggcgctggtgcagcactgcagataccattcgccatgc
aaatggcatatcgtttcaacggtatcggtgtcacacagaatgtcctatatgagaaccagaag
ctgatcgcaaatcagttcaatagtgccatcggaaaaatccaggatagccttagcagcacagc
ctcagcccttggcaaactccaggatgtcgtgaaccagaatgcccaggctctcaataccctcg
tgaagcagctctcatctaatttcggcgcaatttccagtgtcctcaacgacatcctcagccgc
ctcgacccccccgaggccgaagtgcagattgacagactgattacaggtcgactccagagcct
ccagacttacgtgactcagcagctgataagagccgccgagataagggccagcgctaacctgg
ctgccacaaagatgtctgagtgcgtgctgggccagtccaagagagtagacttctgtggcaaa
ggctaccatctgatgagcttcccacaatccgcacctcacggcgtagtgttcctccacgtgac
atatgtaccggctcaggagaagaatttcactaccgctcctgctatatgccatgatggaaagg
ctcacttcccccgggagggggtgttcgtgtccaacggcacccattggtttgtgactcagcgg
aatttctacgaaccccagatcataaccactgacaacacatttgtgtccggaaattgtgacgt
ggtcattggaatagtgaacaacactgtttatgatccactgcagccagaacttgacagcttta
aggaggagctcgacaagtacttcaagaatcatacgtcaccagatgtggacctcggagatatt
agcggtatcaatgccagtgttgtcaatattcagaaggaaatagaccgccttaatgaggtcgc
caaaaatctgaacgagagcctcatcgatcttcaggagctgggcaaatatgagcagtacatca
agtggccttggtatatttggcttggcttcatcgccggcctgatcgccatagtaatggtcaca
attatgctcgtcttcatatgtgtgaagaatggaaacatgcggtgcactatttgtatataa
PDI-S-protein + H9 HK DNA
(SEQ ID NO: 78)
atggcgaaaaacgttgcgattttcggcttattgttttctcttcttgtgttggttccttctca
gatcttcgcggtgaatcttacgacgcgaacacagttaccacccgcatatacaaatagcttca
ctcggggtgtttattaccccgacaaagtgttcaggtcctccgtgctccactcaacacaggac
ctctttcttcctttcttttctaacgtgacatggtttcatgccattcatgtatccggcactaa
cggtactaagaggttcgataatcctgtgctccctttcaatgacggcgtttactttgcaagca
cagagaagagtaacatcatccgaggttggatctttggcactaccctcgattcaaagacgcag
agcctcctcattgtgaacaatgccactaacgtggtgatcaaagtttgcgagtttcagttctg
caatgaccctttcttgggggtgtactatcataagaacaacaagtcttggatggaatctgaat
tccgcgtctatagcagcgccaacaactgcacctttgaatacgtgtcccagcccttccttatg
gacctggagggaaagcagggaaactttaagaatctgagagagttcgtgtttaaaaatatcga
cggctattttaagatctattctaagcacacgcctattaatctcgtgcgcgatcttccacaag
gcttcagcgccctggaaccactcgtggacctcccaattggtatcaacatcactagatttcag
actctgcttgccctccaccgatcctatctgacacccggagactcctctagcggctggactgc
cggcgctgccgcttattacgttggttatcttcagccacgcacgttcctgctgaagtataacg
agaatggtactattaccgatgccgtggattgtgcccttgaccccctgtccgaaactaagtgc
acactcaagtcattcactgtggaaaaaggaatctaccagacaagcaattttcgggtccagcc
tactgagagcattgtgcgctttcctaacatcacaaatctttgccccttcggagaggttttca
atgctacacggtttgcctccgtgtatgcctggaaccgcaagagaatttccaattgcgtggcc
gattactccgtgctctacaatagtgcaagctttagcacctttaagtgctatggcgtatcccc
tactaagcttaacgacttgtgtttcacaaacgtgtatgccgactcctttgtgatacggggcg
acgaagttagacagatagcaccaggacagacgggaaagatagctgactacaactataagctt
cctgatgacttcactggctgcgttatcgcgtggaattctaacaacctggactcaaaagtcgg
cggcaactataactatctctatcggctgttccgcaagagtaaccttaagccctttgagagag
atataagcactgaaatctaccaggctggcagtacgccctgtaatggcgtggaaggctttaat
tgttattttccactgcaatcctatggttttcagccaaccaatggcgtgggctaccaaccata
ccgcgtcgtggtgctctcctttgaactgctccacgctcccgcgactgtctgcggccccaaga
agtccacgaaccttgtgaagaataagtgcgttaattttaatttcaacggcctcactggaaca
ggagtgctcactgagagtaacaagaagttcctgccatttcaacaatttggcagagacatagc
cgatactactgacgccgttagggacccccagaccctcgagattctcgatataacgccctgct
ccttcggtggagtttccgtgatcacgccaggcaccaataccagtaaccaggtcgccgtgctg
tatcaggatgtcaactgtactgaggtgcccgtagccatccatgcggatcagctcacaccaac
ttggagggtgtacagcaccggctccaatgtattccagactcgggccggatgccttattggcg
ccgaacacgtgaacaatagttacgaatgcgatattccaattggcgccggaatctgtgctagc
taccagactcagacgaactccccaggcagcgccagcagcgttgccagccagtcaatcatcgc
ttatacaatgtcacttggagccgaaaactccgtggcttactcaaacaacagcatcgccatcc
ccacaaacttcaccatatccgtgacaactgagattctgccagtgtccatgactaagacgtcc
gtagattgcactatgtacatatgcggcgacagcacagaatgttctaatctgctgctgcaata
tggaagcttctgcactcaactgaacagagcgctcacaggcatcgccgtggagcaggataaga
atacccaggaggtgttcgcccaagttaagcagatctacaagaccccacccataaaggatttc
ggtggattcaattttagtcagatactcccagacccatctaagccatccaagaggagctttat
cgaggatcttttgtttaacaaagttactctggccgacgccggtttcatcaagcagtacggag
attgcctcggcgacatcgctgctcgtgacctcatctgtgcgcaaaagtttaacggtctgacg
gtgctgcctcccctccttactgatgaaatgatcgcccagtataccagcgcactcctcgctgg
caccataacatccggttggacattcggcgctggtgcagcactgcagataccattcgccatgc
aaatggcatatcgtttcaacggtatcggtgtcacacagaatgtcctatatgagaaccagaag
ctgatcgcaaatcagttcaatagtgccatcggaaaaatccaggatagccttagcagcacagc
ctcagcccttggcaaactccaggatgtcgtgaaccagaatgcccaggctctcaataccctcg
tgaagcagctctcatctaatttcggcgcaatttccagtgtcctcaacgacatcctcagccgc
ctcgacccccccgaggccgaagtgcagattgacagactgattacaggtcgactccagagcct
ccagacttacgtgactcagcagctgataagagccgccgagataagggccagcgctaacctgg
ctgccacaaagatgtctgagtgcgtgctgggccagtccaagagagtagacttctgtggcaaa
ggctaccatctgatgagcttcccacaatccgcacctcacggcgtagtgttcctccacgtgac
atatgtaccggctcaggagaagaatttcactaccgctcctgctatatgccatgatggaaagg
ctcacttcccccgggagggggtgttcgtgtccaacggcacccattggtttgtgactcagcgg
aatttctacgaaccccagatcataaccactgacaacacatttgtgtccggaaattgtgacgt
ggtcattggaatagtgaacaacactgtttatgatccactgcagccagaacttgacagcttta
aggaggagctcgacaagtacttcaagaatcatacgtcaccagatgtggacctcggagatatt
agcggtatcaatgccagtgttgtcaatattcagaaggaaatagaccgccttaatgaggtcgc
caaaaatctgaacgagagcctcatcgatcttcaggagctgggcaaatatgagcagtacatca
agtggccttggtatatttggcttggcttcatcgccggcctgatcgccatagtaatggtcaca
attatgctcctgttctgggccatgtccaatggatcttgcagatgcaacatttgtatataa
PDI-S-protein + B/ Wash DNA
(SEQ ID NO: 79)
atggcgaaaaacgttgcgattttcggcttattgttttctcttcttgtgttggttccttctca
gatcttcgcggtgaatcttacgacgcgaacacagttaccacccgcatatacaaatagcttca
ctcggggtgtttattaccccgacaaagtgttcaggtcctccgtgctccactcaacacaggac
ctctttcttcctttcttttctaacgtgacatggtttcatgccattcatgtatccggcactaa
cggtactaagaggttcgataatcctgtgctccctttcaatgacggcgtttactttgcaagca
cagagaagagtaacatcatccgaggttggatctttggcactaccctcgattcaaagacgcag
agcctcctcattgtgaacaatgccactaacgtggtgatcaaagtttgcgagtttcagttctg
caatgaccctttcttgggggtgtactatcataagaacaacaagtcttggatggaatctgaat
tccgcgtctatagcagcgccaacaactgcacctttgaatacgtgtcccagcccttccttatg
gacctggagggaaagcagggaaactttaagaatctgagagagttcgtgtttaaaaatatcga
cggctattttaagatctattctaagcacacgcctattaatctcgtgcgcgatcttccacaag
gcttcagcgccctggaaccactcgtggacctcccaattggtatcaacatcactagatttcag
actctgcttgccctccaccgatcctatctgacacccggagactcctctagcggctggactgc
cggcgctgccgcttattacgttggttatcttcagccacgcacgttcctgctgaagtataacg
agaatggtactattaccgatgccgtggattgtgcccttgaccccctgtccgaaactaagtgc
acactcaagtcattcactgtggaaaaaggaatctaccagacaagcaattttcgggtccagcc
tactgagagcattgtgcgctttcctaacatcacaaatctttgccccttcggagaggttttca
atgctacacggtttgcctccgtgtatgcctggaaccgcaagagaatttccaattgcgtggcc
gattactccgtgctctacaatagtgcaagctttagcacctttaagtgctatggcgtatcccc
tactaagcttaacgacttgtgtttcacaaacgtgtatgccgactcctttgtgatacggggcg
acgaagttagacagatagcaccaggacagacgggaaagatagctgactacaactataagctt
cctgatgacttcactggctgcgttatcgcgtggaattctaacaacctggactcaaaagtcgg
cggcaactataactatctctatcggctgttccgcaagagtaaccttaagccctttgagagag
atataagcactgaaatctaccaggctggcagtacgccctgtaatggcgtggaaggctttaat
tgttattttccactgcaatcctatggttttcagccaaccaatggcgtgggctaccaaccata
ccgcgtcgtggtgctctcctttgaactgctccacgctcccgcgactgtctgcggccccaaga
agtccacgaaccttgtgaagaataagtgcgttaattttaatttcaacggcctcactggaaca
ggagtgctcactgagagtaacaagaagttcctgccatttcaacaatttggcagagacatagc
cgatactactgacgccgttagggacccccagaccctcgagattctcgatataacgccctgct
ccttcggtggagtttccgtgatcacgccaggcaccaataccagtaaccaggtcgccgtgctg
tatcaggatgtcaactgtactgaggtgcccgtagccatccatgcggatcagctcacaccaac
ttggagggtgtacagcaccggctccaatgtattccagactcgggccggatgccttattggcg
ccgaacacgtgaacaatagttacgaatgcgatattccaattggcgccggaatctgtgctagc
taccagactcagacgaactccccaggcagcgccagcagcgttgccagccagtcaatcatcgc
ttatacaatgtcacttggagccgaaaactccgtggcttactcaaacaacagcatcgccatcc
ccacaaacttcaccatatccgtgacaactgagattctgccagtgtccatgactaagacgtcc
gtagattgcactatgtacatatgcggcgacagcacagaatgttctaatctgctgctgcaata
tggaagcttctgcactcaactgaacagagcgctcacaggcatcgccgtggagcaggataaga
atacccaggaggtgttcgcccaagttaagcagatctacaagaccccacccataaaggatttc
ggtggattcaattttagtcagatactcccagacccatctaagccatccaagaggagctttat
cgaggatcttttgtttaacaaagttactctggccgacgccggtttcatcaagcagtacggag
attgcctcggcgacatcgctgctcgtgacctcatctgtgcgcaaaagtttaacggtctgacg
gtgctgcctcccctccttactgatgaaatgatcgcccagtataccagcgcactcctcgctgg
caccataacatccggttggacattcggcgctggtgcagcactgcagataccattcgccatgc
aaatggcatatcgtttcaacggtatcggtgtcacacagaatgtcctatatgagaaccagaag
ctgatcgcaaatcagttcaatagtgccatcggaaaaatccaggatagccttagcagcacagc
ctcagcccttggcaaactccaggatgtcgtgaaccagaatgcccaggctctcaataccctcg
tgaagcagctctcatctaatttcggcgcaatttccagtgtcctcaacgacatcctcagccgc
ctcgacccccccgaggccgaagtgcagattgacagactgattacaggtcgactccagagcct
ccagacttacgtgactcagcagctgataagagccgccgagataagggccagcgctaacctgg
ctgccacaaagatgtctgagtgcgtgctgggccagtccaagagagtagacttctgtggcaaa
ggctaccatctgatgagcttcccacaatccgcacctcacggcgtagtgttcctccacgtgac
atatgtaccggctcaggagaagaatttcactaccgctcctgctatatgccatgatggaaagg
ctcacttcccccgggagggggtgttcgtgtccaacggcacccattggtttgtgactcagcgg
aatttctacgaaccccagatcataaccactgacaacacatttgtgtccggaaattgtgacgt
ggtcattggaatagtgaacaacactgtttatgatccactgcagccagaacttgacagcttta
aggaggagctcgacaagtacttcaagaatcatacgtcaccagatgtggacctcggagatatt
agcggtatcaatgccagtgttgtcaatattcagaaggaaatagaccgccttaatgaggtcgc
caaaaatctgaacgagagcctcatcgatcttcaggagctgggcaaatatgagcagtacatca
agtggccttggtatatttggcttggcttcatcgccggcctgatcgccatagtaatggtcaca
attatgctcgttgtttatatggtctccagagacaatgtttcttgctccatttgtctataa
IF-H1HawaiiCT.r
(SEQ ID NO: 80)
acgacacgactaaggcctttaaatacatattctacactgtagagaccc
IF-H3MinnesotaCT.r
(SEQ ID NO: 81)
acgacacgactaaggcctttagatgcagatgttgcatctgatgttgcccttctg
IF-HongKongCT.r
(SEQ ID NO: 82)
acgacacgactaaggcctttatatacatatcctgcactgcattgaaccattt
IF-GuangdongCT.r
(SEQ ID NO: 83)
acgacacgactaaggcctttatatacaaatagtgcaccgcatgtttcca
IF-H9HKCT.r
(SEQ ID NO: 84)
acgacacgactaaggcctttatatacaaatgttgcatctgcaagatccat
IF-BWashCT.r
(SEQ ID NO: 85)
acgacacgactaaggcctttatagacaaatggagcaagaaacattgtctc
IF(nbHEL40)-PDI.c
(SEQ ID NO: 86)
ccaaaacacattgagcaaaatggcgaaaaacgttgcgattttcggcttat
IF(AvB + wtCT).r
(SEQ ID NO: 87)
ACGACACGACTAAGGCCTTTAGGTATAATGGAGTTTCACCCCCTTCAGAA
PDI-SARS-COV-1 wtTMCT-DNA
(SEQ ID NO: 88)
atggcgaaaaacgttgcgattttcggcttattgttttctcttcttgtgttggttccttctca
gatcttcgcgTCCGATCTGGATCGGTGCACTACATTTGACGATGTGCAGGCACCTAATTATA
CTCAGCACACCTCTTCCATGCGGGGCGTGTACTACCCCGACGAGATTTTTAGAAGTGACACA
CTGTACCTGACCCAAGACCTTTTTCTCCCATTTTATAGCAATGTCACGGGATTCCACACTAT
CAATCACACATTCGGAAACCCTGTTATCCCCTTTAAAGACGGTATCTACTTTGCTGCTACTG
AGAAATCGAATGTTGTTCGCGGTTGGGTGTTCGGCTCAACCATGAACAACAAGAGTCAGTCA
GTAATAATTATAAACAACTCAACCAATGTCGTCATCAGGGCTTGCAACTTCGAGCTCTGCGA
TAACCCCTTCTTTGCGGTGTCCAAACCGATGGGCACTCAGACCCATACCATGATTTTTGACA
ATGCCTTTAATTGTACTTTCGAATACATCAGCGATGCCTTCTCGCTGGATGTGTCCGAGAAG
AGCGGTAACTTCAAGCATTTGCGGGAGTTCGTTTTCAAAAACAAAGACGGGTTTTTGTATGT
CTACAAAGGCTATCAGCCCATTGATGTGGTCAGGGATCTGCCCAGTGGTTTCAACACACTGA
AGCCCATCTTCAAGTTGCCACTCGGCATCAACATCACTAATTTCCGCGCCATCCTAACTGCT
TTTTCGCCAGCGCAGGATATTTGGGGGACATCCGCCGCAGCTTACTTCGTGGGATATCTGAA
GCCCACCACTTTTATGCTAAAGTACGACGAGAATGGCACCATCACCGATGCCGTGGACTGCT
CACAGAATCCTCTCGCAGAGCTCAAGTGTTCAGTGAAGTCATTTGAGATCGACAAAGGGATC
TACCAAACATCTAACTTTCGCGTCGTGCCTTCCGGTGACGTAGTCCGTTTCCCAAATATCAC
TAACTTGTGCCCTTTTGGTGAAGTATTCAACGCAACCAAATTCCCCAGTGTGTATGCGTGGG
AGCGCAAAAAGATCAGTAACTGTGTGGCTGACTATAGTGTTCTGTACAATAGCACCTTCTTC
AGCACCTTCAAGTGTTATGGAGTGAGCGCTACAAAACTGAACGATCTTTGTTTCTCAAACGT
GTACGCCGATTCATTTGTCGTTAAAGGTGACGATGTGAGGCAGATCGCTCCAGGCCAGACAG
GTGTGATTGCTGACTATAATTACAAACTGCCAGACGACTTCATGGGGTGCGTGCTAGCTTGG
AATACAAGAAACATTGACGCCACCTCCACGGGAAATTACAATTACAAGTATCGTTACCTTCG
CCATGGAAAGTTGAGACCCTTCGAGCGTGATATAAGTAACGTGCCCTTTAGTCCAGATGGAA
AACCCTGCACACCCCCTGCTCTCAATTGCTATTGGCCTCTCAATGACTACGGCTTTTACACA
ACTACTGGCATCGGATACCAGCCTTACCGGGTCGTGGTGCTCAGTTTTGAGTTGCTTAACGC
ACCCGCCACCGTGTGTGGTCCTAAACTTTCTACTGACCTGATTAAAAACCAATGCGTCAACT
TCAATTTTAACGGGCTGACCGGCACCGGTGTCCTGACCCCTAGCTCTAAGAGATTCCAGCCT
TTTCAGCAGTTCGGGAGGGATGTGAGCGACTTTACCGACTCTGTCAGGGATCCAAAGACCAG
CGAGATACTGGATATCTCGCCCTGCAGTTTCGGTGGCGTGTCCGTTATTACACCTGGCACCA
ACGCCTCCTCAGAGGTGGCGGTGCTCTATCAAGATGTCAACTGCACTGATGTGTCAACTGCC
ATCCATGCCGATCAGCTGACCCCCGCCTGGCGCATCTACAGTACCGGGAACAACGTTTTTCA
GACCCAGGCCGGCTGTCTAATCGGCGCAGAGCACGTTGACACATCCTACGAATGTGACATAC
CTATCGGGGCAGGCATTTGCGCTAGCTACCATACCGTGTCACTGTTGGCTTCCACGTCACAA
AAGTCAATCGTTGCCTACACGATGAGTCTGGGGGCTGACTCATCTATCGCCTACAGCAACAA
TACCATTGCAATTCCCACAAACTTCAGTATCTCCATCACAACAGAGGTGATGCCCGTTTCTA
TGGCTAAAACATCAGTCGATTGCAATATGTATATATGCGGCGATAGTACTGAGTGCGCCAAT
CTCTTGTTACAGTACGGCTCCTTTTGTACCCAGCTGAACCGAGCACTGTCTGGAATCGCCGC
AGAACAGGATCGCAATACCCGGGAAGTCTTCGCCCAGGTGAAGCAGATGTACAAAACGCCCA
CTCTCAAGTATTTCGGCGGATTCAACTTTTCTCAGATTTTGCCTGACCCGCTCAAGCCAACA
AAACGATCTTTTATCGAAGACCTTCTGTTTAACAAGGTCACACTGGCGGATGCTGGGTTCAT
GAAACAGTACGGTGAATGCCTGGGGGACATCAATGCCAGAGATCTGATCTGCGCCCAGAAAT
TCAATGGCTTAACAGTCCTCCCACCTCTCTTGACCGACGATATGATCGCTGCGTACACCGCT
GCTCTGGTATCGGGCACCGCGACTGCTGGCTGGACCTTTGGTGCCGGAGCCGCACTCCAGAT
CCCATTCGCCATGCAGATGGCCTACCGCTTCAACGGAATCGGGGTCACCCAGAACGTGCTGT
ATGAGAACCAGAAACAGATCGCCAATCAGTTCAATAAGGCAATTAGTCAGATTCAGGAGAGT
CTTACCACTACCAGCACCGCCCTGGGCAAGCTGCAAGATGTTGTGAACCAGAATGCGCAGGC
ATTAAACACTCTGGTTAAACAGCTGAGCTCAAATTTTGGTGCAATCTCTTCAGTTCTGAACG
ATATCCTGAGTCGGCTGGATCCGCCAGAGGCTGAAGTGCAAATTGATCGTTTGATCACCGGG
AGGCTACAATCTCTGCAGACGTACGTGACCCAGCAGCTCATCCGGGCAGCCGAAATTCGCGC
ATCAGCCAACCTCGCTGCAACTAAGATGTCTGAGTGCGTGCTGGGCCAGAGTAAGAGGGTGG
ACTTTTGTGGTAAGGGATACCACCTCATGTCCTTTCCGCAAGCGGCTCCCCACGGCGTGGTT
TTCTTACACGTTACCTATGTGCCATCCCAAGAACGCAATTTCACCACCGCTCCAGCTATCTG
TCATGAGGGCAAAGCATATTTCCCCAGGGAAGGAGTATTTGTGTTTAATGGCACGTCCTGGT
TTATAACCCAACGTAACTTTTTCTCCCCACAGATTATCACAACCGACAACACATTCGTGTCT
GGGAATTGTGACGTCGTGATCGGGATCATTAACAATACCGTTTACGATCCCTTGCAGCCCGA
GCTTGACTCCTTTAAAGAGGAACTAGACAAATACTTTAAGAATCACACCTCACCGGACGTAG
ATTTGGGAGACATCTCTGGAATTAATGCCTCTGTGGTGAATATCCAGAAGGAGATCGACCGC
CTGAATGAAGTCGCCAAGAACCTCAACGAGTCCCTGATAGATCTGCAAGAACTGGGCAAATA
TGAACAGTACATCAAATGGCCGTGGTACGTGTGGTTGGGCTTTATCGCTGGACTTATTGCAA
TCGTGATGGTGACGATTCTGCTCTGCTGTATGACTTCCTGCTGCTCTTGTCTGAAGGGCGCC
TGTAGCTGTGGTTCCTGCTGCAAGTTCGACGAAGACGACTCCGAACCAGTTCTGAAGGGGGT
GAAACTCCATTATACCTAA
PDI-SARS-COV-1 H5iTMCT-DNA
(SEQ ID NO: 89)
atggcgaaaaacgttgcgattttcggcttattgttttctcttcttgtgttggttccttctca
gatcttcgcgTCCGATCTGGATCGGTGCACTACATTTGACGATGTGCAGGCACCTAATTATA
CTCAGCACACCTCTTCCATGCGGGGCGTGTACTACCCCGACGAGATTTTTAGAAGTGACACA
CTGTACCTGACCCAAGACCTTTTTCTCCCATTTTATAGCAATGTCACGGGATTCCACACTAT
CAATCACACATTCGGAAACCCTGTTATCCCCTTTAAAGACGGTATCTACTTTGCTGCTACTG
AGAAATCGAATGTTGTTCGCGGTTGGGTGTTCGGCTCAACCATGAACAACAAGAGTCAGTCA
GTAATAATTATAAACAACTCAACCAATGTCGTCATCAGGGCTTGCAACTTCGAGCTCTGCGA
TAACCCCTTCTTTGCGGTGTCCAAACCGATGGGCACTCAGACCCATACCATGATTTTTGACA
ATGCCTTTAATTGTACTTTCGAATACATCAGCGATGCCTTCTCGCTGGATGTGTCCGAGAAG
AGCGGTAACTTCAAGCATTTGCGGGAGTTCGTTTTCAAAAACAAAGACGGGTTTTTGTATGT
CTACAAAGGCTATCAGCCCATTGATGTGGTCAGGGATCTGCCCAGTGGTTTCAACACACTGA
AGCCCATCTTCAAGTTGCCACTCGGCATCAACATCACTAATTTCCGCGCCATCCTAACTGCT
TTTTCGCCAGCGCAGGATATTTGGGGGACATCCGCCGCAGCTTACTTCGTGGGATATCTGAA
GCCCACCACTTTTATGCTAAAGTACGACGAGAATGGCACCATCACCGATGCCGTGGACTGCT
CACAGAATCCTCTCGCAGAGCTCAAGTGTTCAGTGAAGTCATTTGAGATCGACAAAGGGATC
TACCAAACATCTAACTTTCGCGTCGTGCCTTCCGGTGACGTAGTCCGTTTCCCAAATATCAC
TAACTTGTGCCCTTTTGGTGAAGTATTCAACGCAACCAAATTCCCCAGTGTGTATGCGTGGG
AGCGCAAAAAGATCAGTAACTGTGTGGCTGACTATAGTGTTCTGTACAATAGCACCTTCTTC
AGCACCTTCAAGTGTTATGGAGTGAGCGCTACAAAACTGAACGATCTTTGTTTCTCAAACGT
GTACGCCGATTCATTTGTCGTTAAAGGTGACGATGTGAGGCAGATCGCTCCAGGCCAGACAG
GTGTGATTGCTGACTATAATTACAAACTGCCAGACGACTTCATGGGGTGCGTGCTAGCTTGG
AATACAAGAAACATTGACGCCACCTCCACGGGAAATTACAATTACAAGTATCGTTACCTTCG
CCATGGAAAGTTGAGACCCTTCGAGCGTGATATAAGTAACGTGCCCTTTAGTCCAGATGGAA
AACCCTGCACACCCCCTGCTCTCAATTGCTATTGGCCTCTCAATGACTACGGCTTTTACACA
ACTACTGGCATCGGATACCAGCCTTACCGGGTCGTGGTGCTCAGTTTTGAGTTGCTTAACGC
ACCCGCCACCGTGTGTGGTCCTAAACTTTCTACTGACCTGATTAAAAACCAATGCGTCAACT
TCAATTTTAACGGGCTGACCGGCACCGGTGTCCTGACCCCTAGCTCTAAGAGATTCCAGCCT
TTTCAGCAGTTCGGGAGGGATGTGAGCGACTTTACCGACTCTGTCAGGGATCCAAAGACCAG
CGAGATACTGGATATCTCGCCCTGCAGTTTCGGTGGCGTGTCCGTTATTACACCTGGCACCA
ACGCCTCCTCAGAGGTGGCGGTGCTCTATCAAGATGTCAACTGCACTGATGTGTCAACTGCC
ATCCATGCCGATCAGCTGACCCCCGCCTGGCGCATCTACAGTACCGGGAACAACGTTTTTCA
GACCCAGGCCGGCTGTCTAATCGGCGCAGAGCACGTTGACACATCCTACGAATGTGACATAC
CTATCGGGGCAGGCATTTGCGCTAGCTACCATACCGTGTCACTGTTGGCTTCCACGTCACAA
AAGTCAATCGTTGCCTACACGATGAGTCTGGGGGCTGACTCATCTATCGCCTACAGCAACAA
TACCATTGCAATTCCCACAAACTTCAGTATCTCCATCACAACAGAGGTGATGCCCGTTTCTA
TGGCTAAAACATCAGTCGATTGCAATATGTATATATGCGGCGATAGTACTGAGTGCGCCAAT
CTCTTGTTACAGTACGGCTCCTTTTGTACCCAGCTGAACCGAGCACTGTCTGGAATCGCCGC
AGAACAGGATCGCAATACCCGGGAAGTCTTCGCCCAGGTGAAGCAGATGTACAAAACGCCCA
CTCTCAAGTATTTCGGCGGATTCAACTTTTCTCAGATTTTGCCTGACCCGCTCAAGCCAACA
AAACGATCTTTTATCGAAGACCTTCTGTTTAACAAGGTCACACTGGCGGATGCTGGGTTCAT
GAAACAGTACGGTGAATGCCTGGGGGACATCAATGCCAGAGATCTGATCTGCGCCCAGAAAT
TCAATGGCTTAACAGTCCTCCCACCTCTCTTGACCGACGATATGATCGCTGCGTACACCGCT
GCTCTGGTATCGGGCACCGCGACTGCTGGCTGGACCTTTGGTGCCGGAGCCGCACTCCAGAT
CCCATTCGCCATGCAGATGGCCTACCGCTTCAACGGAATCGGGGTCACCCAGAACGTGCTGT
ATGAGAACCAGAAACAGATCGCCAATCAGTTCAATAAGGCAATTAGTCAGATTCAGGAGAGT
CTTACCACTACCAGCACCGCCCTGGGCAAGCTGCAAGATGTTGTGAACCAGAATGCGCAGGC
ATTAAACACTCTGGTTAAACAGCTGAGCTCAAATTTTGGTGCAATCTCTTCAGTTCTGAACG
ATATCCTGAGTCGGCTGGATCCGCCAGAGGCTGAAGTGCAAATTGATCGTTTGATCACCGGG
AGGCTACAATCTCTGCAGACGTACGTGACCCAGCAGCTCATCCGGGCAGCCGAAATTCGCGC
ATCAGCCAACCTCGCTGCAACTAAGATGTCTGAGTGCGTGCTGGGCCAGAGTAAGAGGGTGG
ACTTTTGTGGTAAGGGATACCACCTCATGTCCTTTCCGCAAGCGGCTCCCCACGGCGTGGTT
TTCTTACACGTTACCTATGTGCCATCCCAAGAACGCAATTTCACCACCGCTCCAGCTATCTG
TCATGAGGGCAAAGCATATTTCCCCAGGGAAGGAGTATTTGTGTTTAATGGCACGTCCTGGT
TTATAACCCAACGTAACTTTTTCTCCCCACAGATTATCACAACCGACAACACATTCGTGTCT
GGGAATTGTGACGTCGTGATCGGGATCATTAACAATACCGTTTACGATCCCTTGCAGCCCGA
GCTTGACTCCTTTAAAGAGGAACTAGACAAATACTTTAAGAATCACACCTCACCGGACGTAG
ATTTGGGAGACATCTCTGGAATTAATGCCTCTGTGGTGAATATCCAGAAGGAGATCGACCGC
CTGAATGAAGTCGCCAAGAACCTCAACGAGTCCCTGATAGATCTGCAAGAACTGGGCAAATA
TGAACAGTACATCAAATGGCCGTGGTACcaaatactgtcaatttattcaacagtggcgagtt
ccctagcactggcaatcatgatggctggtctatctttatggatgtgctccaatggatcgtta
caatgcagaatttgcattTAA
PDI-SARS-COV-1 H5iCT-DNA
(SEQ ID NO: 90)
atggcgaaaaacgttgcgattttcggcttattgttttctcttcttgtgttggttccttctca
gatcttcgcgTCCGATCTGGATCGGTGCACTACATTTGACGATGTGCAGGCACCTAATTATA
CTCAGCACACCTCTTCCATGCGGGGCGTGTACTACCCCGACGAGATTTTTAGAAGTGACACA
CTGTACCTGACCCAAGACCTTTTTCTCCCATTTTATAGCAATGTCACGGGATTCCACACTAT
CAATCACACATTCGGAAACCCTGTTATCCCCTTTAAAGACGGTATCTACTTTGCTGCTACTG
AGAAATCGAATGTTGTTCGCGGTTGGGTGTTCGGCTCAACCATGAACAACAAGAGTCAGTCA
GTAATAATTATAAACAACTCAACCAATGTCGTCATCAGGGCTTGCAACTTCGAGCTCTGCGA
TAACCCCTTCTTTGCGGTGTCCAAACCGATGGGCACTCAGACCCATACCATGATTTTTGACA
ATGCCTTTAATTGTACTTTCGAATACATCAGCGATGCCTTCTCGCTGGATGTGTCCGAGAAG
AGCGGTAACTTCAAGCATTTGCGGGAGTTCGTTTTCAAAAACAAAGACGGGTTTTTGTATGT
CTACAAAGGCTATCAGCCCATTGATGTGGTCAGGGATCTGCCCAGTGGTTTCAACACACTGA
AGCCCATCTTCAAGTTGCCACTCGGCATCAACATCACTAATTTCCGCGCCATCCTAACTGCT
TTTTCGCCAGCGCAGGATATTTGGGGGACATCCGCCGCAGCTTACTTCGTGGGATATCTGAA
GCCCACCACTTTTATGCTAAAGTACGACGAGAATGGCACCATCACCGATGCCGTGGACTGCT
CACAGAATCCTCTCGCAGAGCTCAAGTGTTCAGTGAAGTCATTTGAGATCGACAAAGGGATC
TACCAAACATCTAACTTTCGCGTCGTGCCTTCCGGTGACGTAGTCCGTTTCCCAAATATCAC
TAACTTGTGCCCTTTTGGTGAAGTATTCAACGCAACCAAATTCCCCAGTGTGTATGCGTGGG
AGCGCAAAAAGATCAGTAACTGTGTGGCTGACTATAGTGTTCTGTACAATAGCACCTTCTTC
AGCACCTTCAAGTGTTATGGAGTGAGCGCTACAAAACTGAACGATCTTTGTTTCTCAAACGT
GTACGCCGATTCATTTGTCGTTAAAGGTGACGATGTGAGGCAGATCGCTCCAGGCCAGACAG
GTGTGATTGCTGACTATAATTACAAACTGCCAGACGACTTCATGGGGTGCGTGCTAGCTTGG
AATACAAGAAACATTGACGCCACCTCCACGGGAAATTACAATTACAAGTATCGTTACCTTCG
CCATGGAAAGTTGAGACCCTTCGAGCGTGATATAAGTAACGTGCCCTTTAGTCCAGATGGAA
AACCCTGCACACCCCCTGCTCTCAATTGCTATTGGCCTCTCAATGACTACGGCTTTTACACA
ACTACTGGCATCGGATACCAGCCTTACCGGGTCGTGGTGCTCAGTTTTGAGTTGCTTAACGC
ACCCGCCACCGTGTGTGGTCCTAAACTTTCTACTGACCTGATTAAAAACCAATGCGTCAACT
TCAATTTTAACGGGCTGACCGGCACCGGTGTCCTGACCCCTAGCTCTAAGAGATTCCAGCCT
TTTCAGCAGTTCGGGAGGGATGTGAGCGACTTTACCGACTCTGTCAGGGATCCAAAGACCAG
CGAGATACTGGATATCTCGCCCTGCAGTTTCGGTGGCGTGTCCGTTATTACACCTGGCACCA
ACGCCTCCTCAGAGGTGGCGGTGCTCTATCAAGATGTCAACTGCACTGATGTGTCAACTGCC
ATCCATGCCGATCAGCTGACCCCCGCCTGGCGCATCTACAGTACCGGGAACAACGTTTTTCA
GACCCAGGCCGGCTGTCTAATCGGCGCAGAGCACGTTGACACATCCTACGAATGTGACATAC
CTATCGGGGCAGGCATTTGCGCTAGCTACCATACCGTGTCACTGTTGGCTTCCACGTCACAA
AAGTCAATCGTTGCCTACACGATGAGTCTGGGGGCTGACTCATCTATCGCCTACAGCAACAA
TACCATTGCAATTCCCACAAACTTCAGTATCTCCATCACAACAGAGGTGATGCCCGTTTCTA
TGGCTAAAACATCAGTCGATTGCAATATGTATATATGCGGCGATAGTACTGAGTGCGCCAAT
CTCTTGTTACAGTACGGCTCCTTTTGTACCCAGCTGAACCGAGCACTGTCTGGAATCGCCGC
AGAACAGGATCGCAATACCCGGGAAGTCTTCGCCCAGGTGAAGCAGATGTACAAAACGCCCA
CTCTCAAGTATTTCGGCGGATTCAACTTTTCTCAGATTTTGCCTGACCCGCTCAAGCCAACA
AAACGATCTTTTATCGAAGACCTTCTGTTTAACAAGGTCACACTGGCGGATGCTGGGTTCAT
GAAACAGTACGGTGAATGCCTGGGGGACATCAATGCCAGAGATCTGATCTGCGCCCAGAAAT
TCAATGGCTTAACAGTCCTCCCACCTCTCTTGACCGACGATATGATCGCTGCGTACACCGCT
GCTCTGGTATCGGGCACCGCGACTGCTGGCTGGACCTTTGGTGCCGGAGCCGCACTCCAGAT
CCCATTCGCCATGCAGATGGCCTACCGCTTCAACGGAATCGGGGTCACCCAGAACGTGCTGT
ATGAGAACCAGAAACAGATCGCCAATCAGTTCAATAAGGCAATTAGTCAGATTCAGGAGAGT
CTTACCACTACCAGCACCGCCCTGGGCAAGCTGCAAGATGTTGTGAACCAGAATGCGCAGGC
ATTAAACACTCTGGTTAAACAGCTGAGCTCAAATTTTGGTGCAATCTCTTCAGTTCTGAACG
ATATCCTGAGTCGGCTGGATCCGCCAGAGGCTGAAGTGCAAATTGATCGTTTGATCACCGGG
AGGCTACAATCTCTGCAGACGTACGTGACCCAGCAGCTCATCCGGGCAGCCGAAATTCGCGC
ATCAGCCAACCTCGCTGCAACTAAGATGTCTGAGTGCGTGCTGGGCCAGAGTAAGAGGGTGG
ACTTTTGTGGTAAGGGATACCACCTCATGTCCTTTCCGCAAGCGGCTCCCCACGGCGTGGTT
TTCTTACACGTTACCTATGTGCCATCCCAAGAACGCAATTTCACCACCGCTCCAGCTATCTG
TCATGAGGGCAAAGCATATTTCCCCAGGGAAGGAGTATTTGTGTTTAATGGCACGTCCTGGT
TTATAACCCAACGTAACTTTTTCTCCCCACAGATTATCACAACCGACAACACATTCGTGTCT
GGGAATTGTGACGTCGTGATCGGGATCATTAACAATACCGTTTACGATCCCTTGCAGCCCGA
GCTTGACTCCTTTAAAGAGGAACTAGACAAATACTTTAAGAATCACACCTCACCGGACGTAG
ATTTGGGAGACATCTCTGGAATTAATGCCTCTGTGGTGAATATCCAGAAGGAGATCGACCGC
CTGAATGAAGTCGCCAAGAACCTCAACGAGTCCCTGATAGATCTGCAAGAACTGGGCAAATA
TGAACAGTACATCAAATGGCCGTGGTACGTGTGGTTGGGCTTTATCGCTGGACTTATTGCAA
TCGTGATGGTGACGATTCTGCTCtctttatggatgtgctccaatggatcgttacaatgcaga
atttgcattTAA
PDI-SARS-COV-1 H5iCT(V4)-DNA
(SEQ ID NO: 91)
atggcgaaaaacgttgcgattttcggcttattgttttctcttcttgtgttggttccttctca
gatcttcgcgTCCGATCTGGATCGGTGCACTACATTTGACGATGTGCAGGCACCTAATTATA
CTCAGCACACCTCTTCCATGCGGGGCGTGTACTACCCCGACGAGATTTTTAGAAGTGACACA
CTGTACCTGACCCAAGACCTTTTTCTCCCATTTTATAGCAATGTCACGGGATTCCACACTAT
CAATCACACATTCGGAAACCCTGTTATCCCCTTTAAAGACGGTATCTACTTTGCTGCTACTG
AGAAATCGAATGTTGTTCGCGGTTGGGTGTTCGGCTCAACCATGAACAACAAGAGTCAGTCA
GTAATAATTATAAACAACTCAACCAATGTCGTCATCAGGGCTTGCAACTTCGAGCTCTGCGA
TAACCCCTTCTTTGCGGTGTCCAAACCGATGGGCACTCAGACCCATACCATGATTTTTGACA
ATGCCTTTAATTGTACTTTCGAATACATCAGCGATGCCTTCTCGCTGGATGTGTCCGAGAAG
AGCGGTAACTTCAAGCATTTGCGGGAGTTCGTTTTCAAAAACAAAGACGGGTTTTTGTATGT
CTACAAAGGCTATCAGCCCATTGATGTGGTCAGGGATCTGCCCAGTGGTTTCAACACACTGA
AGCCCATCTTCAAGTTGCCACTCGGCATCAACATCACTAATTTCCGCGCCATCCTAACTGCT
TTTTCGCCAGCGCAGGATATTTGGGGGACATCCGCCGCAGCTTACTTCGTGGGATATCTGAA
GCCCACCACTTTTATGCTAAAGTACGACGAGAATGGCACCATCACCGATGCCGTGGACTGCT
CACAGAATCCTCTCGCAGAGCTCAAGTGTTCAGTGAAGTCATTTGAGATCGACAAAGGGATC
TACCAAACATCTAACTTTCGCGTCGTGCCTTCCGGTGACGTAGTCCGTTTCCCAAATATCAC
TAACTTGTGCCCTTTTGGTGAAGTATTCAACGCAACCAAATTCCCCAGTGTGTATGCGTGGG
AGCGCAAAAAGATCAGTAACTGTGTGGCTGACTATAGTGTTCTGTACAATAGCACCTTCTTC
AGCACCTTCAAGTGTTATGGAGTGAGCGCTACAAAACTGAACGATCTTTGTTTCTCAAACGT
GTACGCCGATTCATTTGTCGTTAAAGGTGACGATGTGAGGCAGATCGCTCCAGGCCAGACAG
GTGTGATTGCTGACTATAATTACAAACTGCCAGACGACTTCATGGGGTGCGTGCTAGCTTGG
AATACAAGAAACATTGACGCCACCTCCACGGGAAATTACAATTACAAGTATCGTTACCTTCG
CCATGGAAAGTTGAGACCCTTCGAGCGTGATATAAGTAACGTGCCCTTTAGTCCAGATGGAA
AACCCTGCACACCCCCTGCTCTCAATTGCTATTGGCCTCTCAATGACTACGGCTTTTACACA
ACTACTGGCATCGGATACCAGCCTTACCGGGTCGTGGTGCTCAGTTTTGAGTTGCTTAACGC
ACCCGCCACCGTGTGTGGTCCTAAACTTTCTACTGACCTGATTAAAAACCAATGCGTCAACT
TCAATTTTAACGGGCTGACCGGCACCGGTGTCCTGACCCCTAGCTCTAAGAGATTCCAGCCT
TTTCAGCAGTTCGGGAGGGATGTGAGCGACTTTACCGACTCTGTCAGGGATCCAAAGACCAG
CGAGATACTGGATATCTCGCCCTGCAGTTTCGGTGGCGTGTCCGTTATTACACCTGGCACCA
ACGCCTCCTCAGAGGTGGCGGTGCTCTATCAAGATGTCAACTGCACTGATGTGTCAACTGCC
ATCCATGCCGATCAGCTGACCCCCGCCTGGCGCATCTACAGTACCGGGAACAACGTTTTTCA
GACCCAGGCCGGCTGTCTAATCGGCGCAGAGCACGTTGACACATCCTACGAATGTGACATAC
CTATCGGGGCAGGCATTTGCGCTAGCTACCATACCGTGTCACTGTTGGCTTCCACGTCACAA
AAGTCAATCGTTGCCTACACGATGAGTCTGGGGGCTGACTCATCTATCGCCTACAGCAACAA
TACCATTGCAATTCCCACAAACTTCAGTATCTCCATCACAACAGAGGTGATGCCCGTTTCTA
TGGCTAAAACATCAGTCGATTGCAATATGTATATATGCGGCGATAGTACTGAGTGCGCCAAT
CTCTTGTTACAGTACGGCTCCTTTTGTACCCAGCTGAACCGAGCACTGTCTGGAATCGCCGC
AGAACAGGATCGCAATACCCGGGAAGTCTTCGCCCAGGTGAAGCAGATGTACAAAACGCCCA
CTCTCAAGTATTTCGGCGGATTCAACTTTTCTCAGATTTTGCCTGACCCGCTCAAGCCAACA
AAACGATCTTTTATCGAAGACCTTCTGTTTAACAAGGTCACACTGGCGGATGCTGGGTTCAT
GAAACAGTACGGTGAATGCCTGGGGGACATCAATGCCAGAGATCTGATCTGCGCCCAGAAAT
TCAATGGCTTAACAGTCCTCCCACCTCTCTTGACCGACGATATGATCGCTGCGTACACCGCT
GCTCTGGTATCGGGCACCGCGACTGCTGGCTGGACCTTTGGTGCCGGAGCCGCACTCCAGAT
CCCATTCGCCATGCAGATGGCCTACCGCTTCAACGGAATCGGGGTCACCCAGAACGTGCTGT
ATGAGAACCAGAAACAGATCGCCAATCAGTTCAATAAGGCAATTAGTCAGATTCAGGAGAGT
CTTACCACTACCAGCACCGCCCTGGGCAAGCTGCAAGATGTTGTGAACCAGAATGCGCAGGC
ATTAAACACTCTGGTTAAACAGCTGAGCTCAAATTTTGGTGCAATCTCTTCAGTTCTGAACG
ATATCCTGAGTCGGCTGGATCCGCCAGAGGCTGAAGTGCAAATTGATCGTTTGATCACCGGG
AGGCTACAATCTCTGCAGACGTACGTGACCCAGCAGCTCATCCGGGCAGCCGAAATTCGCGC
ATCAGCCAACCTCGCTGCAACTAAGATGTCTGAGTGCGTGCTGGGCCAGAGTAAGAGGGTGG
ACTTTTGTGGTAAGGGATACCACCTCATGTCCTTTCCGCAAGCGGCTCCCCACGGCGTGGTT
TTCTTACACGTTACCTATGTGCCATCCCAAGAACGCAATTTCACCACCGCTCCAGCTATCTG
TCATGAGGGCAAAGCATATTTCCCCAGGGAAGGAGTATTTGTGTTTAATGGCACGTCCTGGT
TTATAACCCAACGTAACTTTTTCTCCCCACAGATTATCACAACCGACAACACATTCGTGTCT
GGGAATTGTGACGTCGTGATCGGGATCATTAACAATACCGTTTACGATCCCTTGCAGCCCGA
GCTTGACTCCTTTAAAGAGGAACTAGACAAATACTTTAAGAATCACACCTCACCGGACGTAG
ATTTGGGAGACATCTCTGGAATTAATGCCTCTGTGGTGAATATCCAGAAGGAGATCGACCGC
CTGAATGAAGTCGCCAAGAACCTCAACGAGTCCCTGATAGATCTGCAAGAACTGGGCAAATA
TGAACAGTACATCAAATGGCCGTGGTACGTGTGGTTGGGCTTTATCGCTGGACTTATTGCAA
TCGTGATGGTGACGATTCTGCTCtgctgctccaatggatcgttacaatgcagaatttgcatt
TAA
PDI-SARS-COV-1 H1cCT-DNA
(SEQ ID NO: 92)
atggcgaaaaacgttgcgattttcggcttattgttttctcttcttgtgttggttccttctca
gatcttcgcgTCCGATCTGGATCGGTGCACTACATTTGACGATGTGCAGGCACCTAATTATA
CTCAGCACACCTCTTCCATGCGGGGCGTGTACTACCCCGACGAGATTTTTAGAAGTGACACA
CTGTACCTGACCCAAGACCTTTTTCTCCCATTTTATAGCAATGTCACGGGATTCCACACTAT
CAATCACACATTCGGAAACCCTGTTATCCCCTTTAAAGACGGTATCTACTTTGCTGCTACTG
AGAAATCGAATGTTGTTCGCGGTTGGGTGTTCGGCTCAACCATGAACAACAAGAGTCAGTCA
GTAATAATTATAAACAACTCAACCAATGTCGTCATCAGGGCTTGCAACTTCGAGCTCTGCGA
TAACCCCTTCTTTGCGGTGTCCAAACCGATGGGCACTCAGACCCATACCATGATTTTTGACA
ATGCCTTTAATTGTACTTTCGAATACATCAGCGATGCCTTCTCGCTGGATGTGTCCGAGAAG
AGCGGTAACTTCAAGCATTTGCGGGAGTTCGTTTTCAAAAACAAAGACGGGTTTTTGTATGT
CTACAAAGGCTATCAGCCCATTGATGTGGTCAGGGATCTGCCCAGTGGTTTCAACACACTGA
AGCCCATCTTCAAGTTGCCACTCGGCATCAACATCACTAATTTCCGCGCCATCCTAACTGCT
TTTTCGCCAGCGCAGGATATTTGGGGGACATCCGCCGCAGCTTACTTCGTGGGATATCTGAA
GCCCACCACTTTTATGCTAAAGTACGACGAGAATGGCACCATCACCGATGCCGTGGACTGCT
CACAGAATCCTCTCGCAGAGCTCAAGTGTTCAGTGAAGTCATTTGAGATCGACAAAGGGATC
TACCAAACATCTAACTTTCGCGTCGTGCCTTCCGGTGACGTAGTCCGTTTCCCAAATATCAC
TAACTTGTGCCCTTTTGGTGAAGTATTCAACGCAACCAAATTCCCCAGTGTGTATGCGTGGG
AGCGCAAAAAGATCAGTAACTGTGTGGCTGACTATAGTGTTCTGTACAATAGCACCTTCTTC
AGCACCTTCAAGTGTTATGGAGTGAGCGCTACAAAACTGAACGATCTTTGTTTCTCAAACGT
GTACGCCGATTCATTTGTCGTTAAAGGTGACGATGTGAGGCAGATCGCTCCAGGCCAGACAG
GTGTGATTGCTGACTATAATTACAAACTGCCAGACGACTTCATGGGGTGCGTGCTAGCTTGG
AATACAAGAAACATTGACGCCACCTCCACGGGAAATTACAATTACAAGTATCGTTACCTTCG
CCATGGAAAGTTGAGACCCTTCGAGCGTGATATAAGTAACGTGCCCTTTAGTCCAGATGGAA
AACCCTGCACACCCCCTGCTCTCAATTGCTATTGGCCTCTCAATGACTACGGCTTTTACACA
ACTACTGGCATCGGATACCAGCCTTACCGGGTCGTGGTGCTCAGTTTTGAGTTGCTTAACGC
ACCCGCCACCGTGTGTGGTCCTAAACTTTCTACTGACCTGATTAAAAACCAATGCGTCAACT
TCAATTTTAACGGGCTGACCGGCACCGGTGTCCTGACCCCTAGCTCTAAGAGATTCCAGCCT
TTTCAGCAGTTCGGGAGGGATGTGAGCGACTTTACCGACTCTGTCAGGGATCCAAAGACCAG
CGAGATACTGGATATCTCGCCCTGCAGTTTCGGTGGCGTGTCCGTTATTACACCTGGCACCA
ACGCCTCCTCAGAGGTGGCGGTGCTCTATCAAGATGTCAACTGCACTGATGTGTCAACTGCC
ATCCATGCCGATCAGCTGACCCCCGCCTGGCGCATCTACAGTACCGGGAACAACGTTTTTCA
GACCCAGGCCGGCTGTCTAATCGGCGCAGAGCACGTTGACACATCCTACGAATGTGACATAC
CTATCGGGGCAGGCATTTGCGCTAGCTACCATACCGTGTCACTGTTGGCTTCCACGTCACAA
AAGTCAATCGTTGCCTACACGATGAGTCTGGGGGCTGACTCATCTATCGCCTACAGCAACAA
TACCATTGCAATTCCCACAAACTTCAGTATCTCCATCACAACAGAGGTGATGCCCGTTTCTA
TGGCTAAAACATCAGTCGATTGCAATATGTATATATGCGGCGATAGTACTGAGTGCGCCAAT
CTCTTGTTACAGTACGGCTCCTTTTGTACCCAGCTGAACCGAGCACTGTCTGGAATCGCCGC
AGAACAGGATCGCAATACCCGGGAAGTCTTCGCCCAGGTGAAGCAGATGTACAAAACGCCCA
CTCTCAAGTATTTCGGCGGATTCAACTTTTCTCAGATTTTGCCTGACCCGCTCAAGCCAACA
AAACGATCTTTTATCGAAGACCTTCTGTTTAACAAGGTCACACTGGCGGATGCTGGGTTCAT
GAAACAGTACGGTGAATGCCTGGGGGACATCAATGCCAGAGATCTGATCTGCGCCCAGAAAT
TCAATGGCTTAACAGTCCTCCCACCTCTCTTGACCGACGATATGATCGCTGCGTACACCGCT
GCTCTGGTATCGGGCACCGCGACTGCTGGCTGGACCTTTGGTGCCGGAGCCGCACTCCAGAT
CCCATTCGCCATGCAGATGGCCTACCGCTTCAACGGAATCGGGGTCACCCAGAACGTGCTGT
ATGAGAACCAGAAACAGATCGCCAATCAGTTCAATAAGGCAATTAGTCAGATTCAGGAGAGT
CTTACCACTACCAGCACCGCCCTGGGCAAGCTGCAAGATGTTGTGAACCAGAATGCGCAGGC
ATTAAACACTCTGGTTAAACAGCTGAGCTCAAATTTTGGTGCAATCTCTTCAGTTCTGAACG
ATATCCTGAGTCGGCTGGATCCGCCAGAGGCTGAAGTGCAAATTGATCGTTTGATCACCGGG
AGGCTACAATCTCTGCAGACGTACGTGACCCAGCAGCTCATCCGGGCAGCCGAAATTCGCGC
ATCAGCCAACCTCGCTGCAACTAAGATGTCTGAGTGCGTGCTGGGCCAGAGTAAGAGGGTGG
ACTTTTGTGGTAAGGGATACCACCTCATGTCCTTTCCGCAAGCGGCTCCCCACGGCGTGGTT
TTCTTACACGTTACCTATGTGCCATCCCAAGAACGCAATTTCACCACCGCTCCAGCTATCTG
TCATGAGGGCAAAGCATATTTCCCCAGGGAAGGAGTATTTGTGTTTAATGGCACGTCCTGGT
TTATAACCCAACGTAACTTTTTCTCCCCACAGATTATCACAACCGACAACACATTCGTGTCT
GGGAATTGTGACGTCGTGATCGGGATCATTAACAATACCGTTTACGATCCCTTGCAGCCCGA
GCTTGACTCCTTTAAAGAGGAACTAGACAAATACTTTAAGAATCACACCTCACCGGACGTAG
ATTTGGGAGACATCTCTGGAATTAATGCCTCTGTGGTGAATATCCAGAAGGAGATCGACCGC
CTGAATGAAGTCGCCAAGAACCTCAACGAGTCCCTGATAGATCTGCAAGAACTGGGCAAATA
TGAACAGTACATCAAATGGCCGTGGTACGTGTGGTTGGGCTTTATCGCTGGACTTATTGCAA
TCGTGATGGTGACGATTCTGCTCagcttctggatgtgctctaatgggtctctacagtgtaga
atatgtattTAA
PDI-SARS-COV-1 wtTMCT-AA
(SEQ ID NO: 93)
MAKNVAIFGLLFSLLVLVPSQIFASDLDRCTTFDDVQAPNYTQHTSSMRGVYYPDEIFRSDT
LYLTQDLFLPFYSNVTGFHTINHTFGNPVIPFKDGIYFAATEKSNVVRGWVFGSTMNNKSQS
VIIINNSTNVVIRACNFELCDNPFFAVSKPMGTQTHTMIFDNAFNCTFEYISDAFSLDVSEK
SGNFKHLREFVFKNKDGFLYVYKGYQPIDVVRDLPSGFNTLKPIFKLPLGINITNFRAILTA
FSPAQDIWGTSAAAYFVGYLKPTTFMLKYDENGTITDAVDCSQNPLAELKCSVKSFEIDKGI
YQTSNFRVVPSGDVVRFPNITNLCPFGEVFNATKFPSVYAWERKKISNCVADYSVLYNSTFF
STFKCYGVSATKLNDLCFSNVYADSFVVKGDDVRQIAPGQTGVIADYNYKLPDDFMGCVLAW
NTRNIDATSTGNYNYKYRYLRHGKLRPFERDISNVPFSPDGKPCTPPALNCYWPLNDYGFYT
TTGIGYQPYRVVVLSFELLNAPATVCGPKLSTDLIKNQCVNFNFNGLTGTGVLTPSSKRFQP
FQQFGRDVSDFTDSVRDPKTSEILDISPCSFGGVSVITPGTNASSEVAVLYQDVNCTDVSTA
IHADQLTPAWRIYSTGNNVFQTQAGCLIGAEHVDTSYECDIPIGAGICASYHTVSLLASTSQ
KSIVAYTMSLGADSSIAYSNNTIAIPTNFSISITTEVMPVSMAKTSVDCNMYICGDSTECAN
LLLQYGSFCTQLNRALSGIAAEQDRNTREVFAQVKQMYKTPTLKYFGGFNFSQILPDPLKPT
KRSFIEDLLFNKVTLADAGFMKQYGECLGDINARDLICAQKFNGLTVLPPLLTDDMIAAYTA
ALVSGTATAGWTFGAGAALQIPFAMQMAYRFNGIGVTQNVLYENQKQIANQFNKAISQIQES
LTTTSTALGKLQDVVNQNAQALNTLVKQLSSNFGAISSVLNDILSRLDPPEAEVQIDRLITG
RLQSLQTYVTQQLIRAAEIRASANLAATKMSECVLGQSKRVDFCGKGYHLMSFPQAAPHGVV
FLHVTYVPSQERNFTTAPAICHEGKAYFPREGVFVFNGTSWFITQRNFFSPQIITTDNTFVS
GNCDVVIGIINNTVYDPLQPELDSFKEELDKYFKNHTSPDVDLGDISGINASVVNIQKEIDR
LNEVAKNLNESLIDLQELGKYEQYIKWPWYVWLGFIAGLIAIVMVTILLCCMTSCCSCLKGA
CSCGSCCKFDEDDSEPVLKGVKLHYT
PDI-SARS-COV-1 H5iTMCT-AA
(SEQ ID NO: 94)
MAKNVAIFGLLFSLLVLVPSQIFASDLDRCTTFDDVQAPNYTQHTSSMRGVYYPDEIFRSDT
LYLTQDLFLPFYSNVTGFHTINHTFGNPVIPFKDGIYFAATEKSNVVRGWVFGSTMNNKSQS
VIIINNSTNVVIRACNFELCDNPFFAVSKPMGTQTHTMIFDNAFNCTFEYISDAFSLDVSEK
SGNFKHLREFVFKNKDGFLYVYKGYQPIDVVRDLPSGFNTLKPIFKLPLGINITNFRAILTA
FSPAQDIWGTSAAAYFVGYLKPTTFMLKYDENGTITDAVDCSQNPLAELKCSVKSFEIDKGI
YQTSNFRVVPSGDVVRFPNITNLCPFGEVFNATKFPSVYAWERKKISNCVADYSVLYNSTFF
STFKCYGVSATKLNDLCFSNVYADSFVVKGDDVRQIAPGQTGVIADYNYKLPDDFMGCVLAW
NTRNIDATSTGNYNYKYRYLRHGKLRPFERDISNVPFSPDGKPCTPPALNCYWPLNDYGFYT
TTGIGYQPYRVVVLSFELLNAPATVCGPKLSTDLIKNQCVNFNFNGLTGTGVLTPSSKRFQP
FQQFGRDVSDFTDSVRDPKTSEILDISPCSFGGVSVITPGTNASSEVAVLYQDVNCTDVSTA
IHADQLTPAWRIYSTGNNVFQTQAGCLIGAEHVDTSYECDIPIGAGICASYHTVSLLASTSQ
KSIVAYTMSLGADSSIAYSNNTIAIPTNFSISITTEVMPVSMAKTSVDCNMYICGDSTECAN
LLLQYGSFCTQLNRALSGIAAEQDRNTREVFAQVKQMYKTPTLKYFGGFNFSQILPDPLKPT
KRSFIEDLLFNKVTLADAGFMKQYGECLGDINARDLICAQKFNGLTVLPPLLTDDMIAAYTA
ALVSGTATAGWTFGAGAALQIPFAMQMAYRFNGIGVTQNVLYENQKQIANQFNKAISQIQES
LTTTSTALGKLQDVVNQNAQALNTLVKQLSSNFGAISSVLNDILSRLDPPEAEVQIDRLITG
RLQSLQTYVTQQLIRAAEIRASANLAATKMSECVLGQSKRVDFCGKGYHLMSFPQAAPHGVV
FLHVTYVPSQERNFTTAPAICHEGKAYFPREGVFVFNGTSWFITQRNFFSPQIITTDNTFVS
GNCDVVIGIINNTVYDPLQPELDSFKEELDKYFKNHTSPDVDLGDISGINASVVNIQKEIDR
LNEVAKNLNESLIDLQELGKYEQYIKWPWYQILSIYSTVASSLALAIMMAGLSLWMCSNGSL
QCRICI
PDI-SARS-COV-1 H5iCT-AA
(SEQ ID NO: 95)
MAKNVAIFGLLFSLLVLVPSQIFASDLDRCTTFDDVQAPNYTQHTSSMRGVYYPDEIFRSDT
LYLTQDLFLPFYSNVTGFHTINHTFGNPVIPFKDGIYFAATEKSNVVRGWVFGSTMNNKSQS
VIIINNSTNVVIRACNFELCDNPFFAVSKPMGTQTHTMIFDNAFNCTFEYISDAFSLDVSEK
SGNFKHLREFVFKNKDGFLYVYKGYQPIDVVRDLPSGFNTLKPIFKLPLGINITNFRAILTA
FSPAQDIWGTSAAAYFVGYLKPTTFMLKYDENGTITDAVDCSQNPLAELKCSVKSFEIDKGI
YQTSNFRVVPSGDVVRFPNITNLCPFGEVFNATKFPSVYAWERKKISNCVADYSVLYNSTFF
STFKCYGVSATKLNDLCFSNVYADSFVVKGDDVRQIAPGQTGVIADYNYKLPDDFMGCVLAW
NTRNIDATSTGNYNYKYRYLRHGKLRPFERDISNVPFSPDGKPCTPPALNCYWPLNDYGFYT
TTGIGYQPYRVVVLSFELLNAPATVCGPKLSTDLIKNQCVNFNFNGLTGTGVLTPSSKRFQP
FQQFGRDVSDFTDSVRDPKTSEILDISPCSFGGVSVITPGTNASSEVAVLYQDVNCTDVSTA
IHADQLTPAWRIYSTGNNVFQTQAGCLIGAEHVDTSYECDIPIGAGICASYHTVSLLASTSQ
KSIVAYTMSLGADSSIAYSNNTIAIPTNFSISITTEVMPVSMAKTSVDCNMYICGDSTECAN
LLLQYGSFCTQLNRALSGIAAEQDRNTREVFAQVKQMYKTPTLKYFGGFNFSQILPDPLKPT
KRSFIEDLLENKVTLADAGFMKQYGECLGDINARDLICAQKFNGLTVLPPLLTDDMIAAYTA
ALVSGTATAGWTFGAGAALQIPFAMQMAYRFNGIGVTQNVLYENQKQIANQFNKAISQIQES
LTTTSTALGKLQDVVNQNAQALNTLVKQLSSNFGAISSVLNDILSRLDPPEAEVQIDRLITG
RLQSLQTYVTQQLIRAAEIRASANLAATKMSECVLGQSKRVDFCGKGYHLMSFPQAAPHGVV
FLHVTYVPSQERNFTTAPAICHEGKAYFPREGVFVFNGTSWFITQRNFFSPQIITTDNTFVS
GNCDVVIGIINNTVYDPLQPELDSFKEELDKYFKNHTSPDVDLGDISGINASVVNIQKEIDR
LNEVAKNLNESLIDLQELGKYEQYIKWPWYVWLGFIAGLIAIVMVTILLSLWMCSNGSLQCR
ICI
PDI-SARS-COV-1 H5iCT(V4)-AA
(SEQ ID NO: 96)
MAKNVAIFGLLFSLLVLVPSQIFASDLDRCTTFDDVQAPNYTQHTSSMRGVYYPDEIFRSDT
LYLTQDLFLPFYSNVTGFHTINHTFGNPVIPFKDGIYFAATEKSNVVRGWVFGSTMNNKSQS
VIIINNSTNVVIRACNFELCDNPFFAVSKPMGTQTHTMIFDNAFNCTFEYISDAFSLDVSEK
SGNFKHLREFVFKNKDGFLYVYKGYQPIDVVRDLPSGFNTLKPIFKLPLGINITNFRAILTA
FSPAQDIWGTSAAAYFVGYLKPTTFMLKYDENGTITDAVDCSQNPLAELKCSVKSFEIDKGI
YQTSNFRVVPSGDVVRFPNITNLCPFGEVFNATKFPSVYAWERKKISNCVADYSVLYNSTFF
STFKCYGVSATKLNDLCFSNVYADSFVVKGDDVRQIAPGQTGVIADYNYKLPDDFMGCVLAW
NTRNIDATSTGNYNYKYRYLRHGKLRPFERDISNVPFSPDGKPCTPPALNCYWPLNDYGFYT
TTGIGYQPYRVVVLSFELLNAPATVCGPKLSTDLIKNQCVNFNFNGLTGTGVLTPSSKRFQP
FQQFGRDVSDFTDSVRDPKTSEILDISPCSFGGVSVITPGTNASSEVAVLYQDVNCTDVSTA
IHADQLTPAWRIYSTGNNVFQTQAGCLIGAEHVDTSYECDIPIGAGICASYHTVSLLASTSQ
KSIVAYTMSLGADSSIAYSNNTIAIPTNFSISITTEVMPVSMAKTSVDCNMYICGDSTECAN
LLLQYGSFCTQLNRALSGIAAEQDRNTREVFAQVKQMYKTPTLKYFGGFNFSQILPDPLKPT
KRSFIEDLLFNKVTLADAGFMKQYGECLGDINARDLICAQKFNGLTVLPPLLTDDMIAAYTA
ALVSGTATAGWTFGAGAALQIPFAMQMAYRFNGIGVTQNVLYENQKQIANQFNKAISQIQES
LTTTSTALGKLQDVVNQNAQALNTLVKQLSSNFGAISSVLNDILSRLDPPEAEVQIDRLITG
RLQSLQTYVTQQLIRAAEIRASANLAATKMSECVLGQSKRVDFCGKGYHLMSFPQAAPHGVV
FLHVTYVPSQERNFTTAPAICHEGKAYFPREGVFVFNGTSWFITQRNFFSPQIITTDNTFVS
GNCDVVIGIINNTVYDPLQPELDSFKEELDKYFKNHTSPDVDLGDISGINASVVNIQKEIDR
LNEVAKNLNESLIDLQELGKYEQYIKWPWYVWLGFIAGLIAIVMVTILLCCSNGSLQCRICI
PDI-SARS-COV-1 H1cCT-AA
(SEQ ID NO: 97)
MAKNVAIFGLLFSLLVLVPSQIFASDLDRCTTFDDVQAPNYTQHTSSMRGVYYPDEIFRSDT
LYLTQDLFLPFYSNVTGFHTINHTFGNPVIPFKDGIYFAATEKSNVVRGWVFGSTMNNKSQS
VIIINNSTNVVIRACNFELCDNPFFAVSKPMGTQTHTMIFDNAFNCTFEYISDAFSLDVSEK
SGNFKHLREFVFKNKDGFLYVYKGYQPIDVVRDLPSGFNTLKPIFKLPLGINITNFRAILTA
FSPAQDIWGTSAAAYFVGYLKPTTFMLKYDENGTITDAVDCSQNPLAELKCSVKSFEIDKGI
YQTSNFRVVPSGDVVRFPNITNLCPFGEVFNATKFPSVYAWERKKISNCVADYSVLYNSTFF
STFKCYGVSATKLNDLCFSNVYADSFVVKGDDVRQIAPGQTGVIADYNYKLPDDFMGCVLAW
NTRNIDATSTGNYNYKYRYLRHGKLRPFERDISNVPFSPDGKPCTPPALNCYWPLNDYGFYT
TTGIGYQPYRVVVLSFELLNAPATVCGPKLSTDLIKNQCVNFNFNGLTGTGVLTPSSKRFQP
FQQFGRDVSDFTDSVRDPKTSEILDISPCSFGGVSVITPGTNASSEVAVLYQDVNCTDVSTA
IHADQLTPAWRIYSTGNNVFQTQAGCLIGAEHVDTSYECDIPIGAGICASYHTVSLLASTSQ
KSIVAYTMSLGADSSIAYSNNTIAIPTNFSISITTEVMPVSMAKTSVDCNMYICGDSTECAN
LLLQYGSFCTQLNRALSGIAAEQDRNTREVFAQVKQMYKTPTLKYFGGFNFSQILPDPLKPT
KRSFIEDLLFNKVTLADAGFMKQYGECLGDINARDLICAQKFNGLTVLPPLLTDDMIAAYTA
ALVSGTATAGWTFGAGAALQIPFAMQMAYRFNGIGVTQNVLYENQKQIANQFNKAISQIQES
LTTTSTALGKLQDVVNQNAQALNTLVKQLSSNFGAISSVLNDILSRLDPPEAEVQIDRLITG
RLQSLQTYVTQQLIRAAEIRASANLAATKMSECVLGQSKRVDFCGKGYHLMSFPQAAPHGVV
FLHVTYVPSQERNFTTAPAICHEGKAYFPREGVFVFNGTSWFITQRNFFSPQIITTDNTFVS
GNCDVVIGIINNTVYDPLQPELDSFKEELDKYFKNHTSPDVDLGDISGINASVVNIQKEIDR
LNEVAKNLNESLIDLQELGKYEQYIKWPWYVWLGFIAGLIAIVMVTILLSFWMCSNGSLQCR
ICI
IF(AvB + wtCT-MERS).r
(SEQ ID NO: 98)
ACGACACGACTAAGGCCTTCAGTGAACGTGGACCTTGTGAGGCTCAAGGTCATACTCCTC
IF(H1cCT-wtTM).r
(SEQ ID NO: 99)
ACGACACGACTAAGGCCTTCAAATACATATTCTACACTGTAGAGACCCA
IF(H5ITMCT).r
(SEQ ID NO: 100)
ACGACACGACTAAGGCCTTCAAATGCAAATTCTGCATTGTAACGATCC
PDI-MERS-wtTMCT-DNA
(SEQ ID NO: 101)
atggcgaaaaacgttgcgattttcggcttattgttttctcttcttgtgttggttccttctca
gatcttcgcgTATGTCGATGTGGGTCCCGATAGTGTTAAGTCCGCCTGCATCGAAGTGGACA
TTCAGCAGACCTTCTTCGATAAGACTTGGCCTCGGCCAATTGATGTGTCCAAGGCCGACGGC
ATTATCTACCCCCAAGGTCGGACATATTCCAACATAACTATCACCTATCAGGGGCTATTCCC
TTATCAGGGCGACCATGGGGACATGTACGTTTACAGCGCTGGTCACGCTACAGGGACGACCC
CCCAGAAGCTCTTCGTGGCGAACTATAGTCAGGACGTGAAACAGTTTGCCAACGGTTTTGTA
GTGCGCATCGGGGCAGCCGCTAACTCCACTGGTACTGTTATTATCAGCCCTTCCACGAGTGC
CACAATTCGAAAGATCTATCCGGCCTTCATGCTAGGATCCTCTGTGGGCAATTTTAGCGACG
GTAAGATGGGTCGGTTCTTCAACCACACGCTTGTGCTGCTTCCCGATGGGTGCGGTACTTTG
CTGAGGGCCTTTTACTGTATCCTAGAGCCCCGATCCGGCAACCACTGCCCCGCCGGGAACTC
GTATACTTCCTTTGCCACTTATCATACTCCAGCCACGGATTGTAGCGATGGGAACTACAATA
GGAACGCCAGTTTGAATTCCTTTAAAGAGTACTTCAACTTGCGGAATTGTACCTTCATGTAT
ACATATAACATTACTGAGGACGAAATTCTCGAATGGTTCGGAATCACTCAAACAGCCCAGGG
AGTGCACCTCTTTAGTTCTCGCTATGTGGACTTATATGGAGGCAATATGTTTCAATTCGCCA
CCTTACCCGTCTACGATACGATCAAGTATTACTCGATCATACCCCACTCCATTAGGTCCATT
CAGAGCGATCGCAAGGCATGGGCCGCATTCTATGTGTATAAGCTCCAGCCCCTGACCTTCCT
CTTGGATTTCTCCGTGGACGGCTACATCAGAAGGGCTATCGATTGCGGGTTCAACGACCTCA
GCCAGCTGCATTGTTCTTATGAGAGCTTTGACGTGGAAAGCGGAGTTTACTCAGTCTCTTCC
TTTGAGGCTAAACCTTCAGGTAGCGTCGTAGAGCAAGCAGAGGGTGTGGAGTGCGATTTCTC
ACCACTGCTCAGCGGAACCCCACCCCAGGTCTACAACTTTAAGCGGCTCGTGTTCACAAACT
GTAACTATAACTTGACTAAGTTGCTGTCACTCTTTTCCGTGAATGATTTTACATGCTCCCAA
ATCAGCCCAGCCGCTATTGCGTCTAATTGCTATTCCTCATTGATCCTGGATTACTTCAGTTA
CCCCCTCTCTATGAAGAGCGATCTCTCGGTTAGTAGCGCTGGGCCTATTTCCCAGTTTAACT
ACAAACAATCCTTTTCCAATCCAACATGCCTGATCTTAGCTACTGTACCCCACAACCTGACT
ACTATTACGAAGCCACTCAAGTACTCATACATTAATAAGTGCAGCCGATTCCTCAGTGATGA
TCGCACCGAAGTGCCGCAGCTTGTAAACGCGAACCAGTACTCCCCATGCGTCTCTATTGTGC
CTTCTACAGTGTGGGAAGACGGCGATTATTATAGAAAGCAGCTGTCGCCACTGGAAGGTGGC
GGGTGGCTAGTTGCCAGTGGGTCCACAGTTGCCATGACCGAGCAACTTCAGATGGGGTTTGG
CATAACAGTGCAGTATGGTACCGATACGAACAGCGTGTGTCCAAAATTGGAATTTGCTAACG
ACACCAAGATCGCCTCCCAGTTGGGAAATTGTGTTGAATATTCCCTGTACGGAGTGTCAGGC
CGGGGGGTGTTCCAAAATTGCACCGCCGTGGGAGTGAGGCAGCAAAGATTCGTGTACGACGC
ATACCAGAATCTAGTCGGATACTATTCTGACGATGGAAACTACTACTGTCTGCGCGCTTGCG
TCTCAGTGCCCGTGAGTGTCATATATGATAAGGAGACCAAGACTCACGCTACTCTCTTTGGT
TCTGTCGCGTGCGAACACATTTCCTCTACAATGTCCCAGTATAGTCGCTCCACTCGGTCTAT
GTTAAAGCGCAGAGACAGTACCTACGGCCCTCTACAGACACCTGTGGGGTGCGTTCTCGGCC
TTGTCAATTCTAGCCTGTTTGTGGAGGATTGTAAGCTGCCCCTTGGTCAAAGCTTATGCGCA
CTGCCCGATACGCCCAGCACACTTACACCAGCTTCAGTGGGGTCCGTCCCCGGGGAAATGAG
ATTGGCCTCGATCGCTTTCAACCACCCCATACAGGTGGATCAGCTCAACTCGTCATACTTCA
AGCTAAGCATCCCTACTAATTTCTCCTTTGGTGTGACTCAGGAGTACATTCAGACCACAATT
CAAAAGGTGACCGTTGACTGCAAGCAGTATGTGTGCAACGGGTTCCAGAAATGTGAACAGCT
GCTCCGGGAGTATGGCCAGTTCTGTTCTAAAATCAACCAGGCCCTCCACGGAGCAAACCTTA
GGCAGGACGATTCTGTCAGAAACCTCTTTGCCAGCGTCAAGAGTTCTCAGAGTTCCCCTATT
ATACCTGGCTTCGGCGGGGATTTCAACCTGACACTACTTGAACCTGTAAGCATATCAACCGG
AAGTCGCAGTGCCCGTTCCGCCATCGAGGATCTGCTCTTCGACAAAGTAACTATTGCAGATC
CCGGATACATGCAGGGGTATGACGACTGCATGCAGCAGGGTCCAGCCTCTGCAAGGGATCTG
ATATGCGCACAGTATGTCGCTGGGTACAAAGTGTTGCCTCCTCTCATGGACGTGAACATGGA
AGCGGCCTATACCTCCTCACTTCTAGGCTCCATAGCGGGCGTGGGATGGACCGCAGGGCTTT
CAAGCTTCGCCGCAATTCCCTTTGCTCAATCTATCTTCTACAGGCTTAATGGCGTTGGAATC
ACCCAGCAGGTGTTAAGCGAAAACCAGAAATTGATTGCCAATAAGTTTAACCAAGCTTTGGG
GGCCATGCAGACAGGCTTTACAACCACAAACGAGGCTTTCCATAAAGTACAGGATGCGGTAA
ACAATAACGCACAAGCCCTGTCAAAGCTGGCTTCAGAGCTCTCAAATACATTTGGCGCTATA
TCCGCGTCTATCGGCGATATCATACAACGGTTGGACCCACCCGAACAGGACGCACAGATTGA
TCGTTTGATCAACGGGAGGCTTACCACCTTAAACGCTTTTGTGGCCCAGCAACTGGTGCGGT
CTGAGAGCGCCGCCTTGAGCGCTCAGCTGGCAAAGGATAAAGTGAATGAATGCGTGAAAGCT
CAATCAAAGAGAAGTGGGTTTTGTGGGCAGGGTACTCATATTGTTTCCTTTGTGGTGAACGC
CCCAAATGGACTCTACTTTATGCATGTTGGATACTACCCGAGCAACCACATCGAGGTCGTTT
CCGCCTATGGGCTTTGTGACGCAGCAAACCCTACTAACTGTATCGCGCCAGTTAATGGCTAC
TTTATTAAAACAAATAACACACGCATTGTGGATGAATGGAGTTACACAGGGTCCAGCTTCTA
CGCTCCAGAGCCTATCACCTCTCTGAACACAAAGTATGTGGCACCTCAGGTCACATATCAGA
ACATCTCGACAAACCTGCCCCCCCCACTCTTGGGCAACTCCACAGGGATCGACTTCCAGGAC
GAGCTTGACGAATTCTTCAAGAACGTGTCCACCAGTATCCCTAATTTTGGTTCGCTGACCCA
AATTAACACAACCCTGCTCGATCTGACATATGAAATGCTTTCACTACAGCAGGTGGTCAAAG
CGTTGAACGAGTCGTATATCGACCTGAAAGAGTTAGGGAATTACACATACTATAACAAATGG
CCCTGGTATATTTGGTTAGGATTCATTGCCGGGCTGGTGGCCCTTGCCTTGTGCGTATTTTT
CATCTTGTGCTGTACCGGTTGCGGTACGAATTGCATGGGAAAACTGAAATGTAATCGGTGCT
GCGATCGCTATGAGGAGTATGACCTTGAGCCTCACAAGGTCCACGTTCACTGA
PDI-MERS-H5iTMCT-DNA
(SEQ ID NO: 102)
atggcgaaaaacgttgcgattttcggcttattgttttctcttcttgtgttggttccttctca
gatcttcgcgTATGTCGATGTGGGTCCCGATAGTGTTAAGTCCGCCTGCATCGAAGTGGACA
TTCAGCAGACCTTCTTCGATAAGACTTGGCCTCGGCCAATTGATGTGTCCAAGGCCGACGGC
ATTATCTACCCCCAAGGTCGGACATATTCCAACATAACTATCACCTATCAGGGGCTATTCCC
TTATCAGGGCGACCATGGGGACATGTACGTTTACAGCGCTGGTCACGCTACAGGGACGACCC
CCCAGAAGCTCTTCGTGGCGAACTATAGTCAGGACGTGAAACAGTTTGCCAACGGTTTTGTA
GTGCGCATCGGGGCAGCCGCTAACTCCACTGGTACTGTTATTATCAGCCCTTCCACGAGTGC
CACAATTCGAAAGATCTATCCGGCCTTCATGCTAGGATCCTCTGTGGGCAATTTTAGCGACG
GTAAGATGGGTCGGTTCTTCAACCACACGCTTGTGCTGCTTCCCGATGGGTGCGGTACTTTG
CTGAGGGCCTTTTACTGTATCCTAGAGCCCCGATCCGGCAACCACTGCCCCGCCGGGAACTC
GTATACTTCCTTTGCCACTTATCATACTCCAGCCACGGATTGTAGCGATGGGAACTACAATA
GGAACGCCAGTTTGAATTCCTTTAAAGAGTACTTCAACTTGCGGAATTGTACCTTCATGTAT
ACATATAACATTACTGAGGACGAAATTCTCGAATGGTTCGGAATCACTCAAACAGCCCAGGG
AGTGCACCTCTTTAGTTCTCGCTATGTGGACTTATATGGAGGCAATATGTTTCAATTCGCCA
CCTTACCCGTCTACGATACGATCAAGTATTACTCGATCATACCCCACTCCATTAGGTCCATT
CAGAGCGATCGCAAGGCATGGGCCGCATTCTATGTGTATAAGCTCCAGCCCCTGACCTTCCT
CTTGGATTTCTCCGTGGACGGCTACATCAGAAGGGCTATCGATTGCGGGTTCAACGACCTCA
GCCAGCTGCATTGTTCTTATGAGAGCTTTGACGTGGAAAGCGGAGTTTACTCAGTCTCTTCC
TTTGAGGCTAAACCTTCAGGTAGCGTCGTAGAGCAAGCAGAGGGTGTGGAGTGCGATTTCTC
ACCACTGCTCAGCGGAACCCCACCCCAGGTCTACAACTTTAAGCGGCTCGTGTTCACAAACT
GTAACTATAACTTGACTAAGTTGCTGTCACTCTTTTCCGTGAATGATTTTACATGCTCCCAA
ATCAGCCCAGCCGCTATTGCGTCTAATTGCTATTCCTCATTGATCCTGGATTACTTCAGTTA
CCCCCTCTCTATGAAGAGCGATCTCTCGGTTAGTAGCGCTGGGCCTATTTCCCAGTTTAACT
ACAAACAATCCTTTTCCAATCCAACATGCCTGATCTTAGCTACTGTACCCCACAACCTGACT
ACTATTACGAAGCCACTCAAGTACTCATACATTAATAAGTGCAGCCGATTCCTCAGTGATGA
TCGCACCGAAGTGCCGCAGCTTGTAAACGCGAACCAGTACTCCCCATGCGTCTCTATTGTGC
CTTCTACAGTGTGGGAAGACGGCGATTATTATAGAAAGCAGCTGTCGCCACTGGAAGGTGGC
GGGTGGCTAGTTGCCAGTGGGTCCACAGTTGCCATGACCGAGCAACTTCAGATGGGGTTTGG
CATAACAGTGCAGTATGGTACCGATACGAACAGCGTGTGTCCAAAATTGGAATTTGCTAACG
ACACCAAGATCGCCTCCCAGTTGGGAAATTGTGTTGAATATTCCCTGTACGGAGTGTCAGGC
CGGGGGGTGTTCCAAAATTGCACCGCCGTGGGAGTGAGGCAGCAAAGATTCGTGTACGACGC
ATACCAGAATCTAGTCGGATACTATTCTGACGATGGAAACTACTACTGTCTGCGCGCTTGCG
TCTCAGTGCCCGTGAGTGTCATATATGATAAGGAGACCAAGACTCACGCTACTCTCTTTGGT
TCTGTCGCGTGCGAACACATTTCCTCTACAATGTCCCAGTATAGTCGCTCCACTCGGTCTAT
GTTAAAGCGCAGAGACAGTACCTACGGCCCTCTACAGACACCTGTGGGGTGCGTTCTCGGCC
TTGTCAATTCTAGCCTGTTTGTGGAGGATTGTAAGCTGCCCCTTGGTCAAAGCTTATGCGCA
CTGCCCGATACGCCCAGCACACTTACACCAGCTTCAGTGGGGTCCGTCCCCGGGGAAATGAG
ATTGGCCTCGATCGCTTTCAACCACCCCATACAGGTGGATCAGCTCAACTCGTCATACTTCA
AGCTAAGCATCCCTACTAATTTCTCCTTTGGTGTGACTCAGGAGTACATTCAGACCACAATT
CAAAAGGTGACCGTTGACTGCAAGCAGTATGTGTGCAACGGGTTCCAGAAATGTGAACAGCT
GCTCCGGGAGTATGGCCAGTTCTGTTCTAAAATCAACCAGGCCCTCCACGGAGCAAACCTTA
GGCAGGACGATTCTGTCAGAAACCTCTTTGCCAGCGTCAAGAGTTCTCAGAGTTCCCCTATT
ATACCTGGCTTCGGCGGGGATTTCAACCTGACACTACTTGAACCTGTAAGCATATCAACCGG
AAGTCGCAGTGCCCGTTCCGCCATCGAGGATCTGCTCTTCGACAAAGTAACTATTGCAGATC
CCGGATACATGCAGGGGTATGACGACTGCATGCAGCAGGGTCCAGCCTCTGCAAGGGATCTG
ATATGCGCACAGTATGTCGCTGGGTACAAAGTGTTGCCTCCTCTCATGGACGTGAACATGGA
AGCGGCCTATACCTCCTCACTTCTAGGCTCCATAGCGGGCGTGGGATGGACCGCAGGGCTTT
CAAGCTTCGCCGCAATTCCCTTTGCTCAATCTATCTTCTACAGGCTTAATGGCGTTGGAATC
ACCCAGCAGGTGTTAAGCGAAAACCAGAAATTGATTGCCAATAAGTTTAACCAAGCTTTGGG
GGCCATGCAGACAGGCTTTACAACCACAAACGAGGCTTTCCATAAAGTACAGGATGCGGTAA
ACAATAACGCACAAGCCCTGTCAAAGCTGGCTTCAGAGCTCTCAAATACATTTGGCGCTATA
TCCGCGTCTATCGGCGATATCATACAACGGTTGGACCCACCCGAACAGGACGCACAGATTGA
TCGTTTGATCAACGGGAGGCTTACCACCTTAAACGCTTTTGTGGCCCAGCAACTGGTGCGGT
CTGAGAGCGCCGCCTTGAGCGCTCAGCTGGCAAAGGATAAAGTGAATGAATGCGTGAAAGCT
CAATCAAAGAGAAGTGGGTTTTGTGGGCAGGGTACTCATATTGTTTCCTTTGTGGTGAACGC
CCCAAATGGACTCTACTTTATGCATGTTGGATACTACCCGAGCAACCACATCGAGGTCGTTT
CCGCCTATGGGCTTTGTGACGCAGCAAACCCTACTAACTGTATCGCGCCAGTTAATGGCTAC
TTTATTAAAACAAATAACACACGCATTGTGGATGAATGGAGTTACACAGGGTCCAGCTTCTA
CGCTCCAGAGCCTATCACCTCTCTGAACACAAAGTATGTGGCACCTCAGGTCACATATCAGA
ACATCTCGACAAACCTGCCCCCCCCACTCTTGGGCAACTCCACAGGGATCGACTTCCAGGAC
GAGCTTGACGAATTCTTCAAGAACGTGTCCACCAGTATCCCTAATTTTGGTTCGCTGACCCA
AATTAACACAACCCTGCTCGATCTGACATATGAAATGCTTTCACTACAGCAGGTGGTCAAAG
CGTTGAACGAGTCGTATATCGACCTGAAAGAGTTAGGGAATTACACATACTATAACAAATGG
CCCTGGTATcaaatactgtcaatttattcaacagtggcgagttccctagcactggcaatcat
gatggctggtctatctttatggatgtgctccaatggatcgttacaatgcagaatttgcattT
GA
PDI-MERS-H5iCT-DNA
(SEQ ID NO: 103)
atggcgaaaaacgttgcgattttcggcttattgttttctcttcttgtgttggttccttctca
gatcttcgcgTATGTCGATGTGGGTCCCGATAGTGTTAAGTCCGCCTGCATCGAAGTGGACA
TTCAGCAGACCTTCTTCGATAAGACTTGGCCTCGGCCAATTGATGTGTCCAAGGCCGACGGC
ATTATCTACCCCCAAGGTCGGACATATTCCAACATAACTATCACCTATCAGGGGCTATTCCC
TTATCAGGGCGACCATGGGGACATGTACGTTTACAGCGCTGGTCACGCTACAGGGACGACCC
CCCAGAAGCTCTTCGTGGCGAACTATAGTCAGGACGTGAAACAGTTTGCCAACGGTTTTGTA
GTGCGCATCGGGGCAGCCGCTAACTCCACTGGTACTGTTATTATCAGCCCTTCCACGAGTGC
CACAATTCGAAAGATCTATCCGGCCTTCATGCTAGGATCCTCTGTGGGCAATTTTAGCGACG
GTAAGATGGGTCGGTTCTTCAACCACACGCTTGTGCTGCTTCCCGATGGGTGCGGTACTTTG
CTGAGGGCCTTTTACTGTATCCTAGAGCCCCGATCCGGCAACCACTGCCCCGCCGGGAACTC
GTATACTTCCTTTGCCACTTATCATACTCCAGCCACGGATTGTAGCGATGGGAACTACAATA
GGAACGCCAGTTTGAATTCCTTTAAAGAGTACTTCAACTTGCGGAATTGTACCTTCATGTAT
ACATATAACATTACTGAGGACGAAATTCTCGAATGGTTCGGAATCACTCAAACAGCCCAGGG
AGTGCACCTCTTTAGTTCTCGCTATGTGGACTTATATGGAGGCAATATGTTTCAATTCGCCA
CCTTACCCGTCTACGATACGATCAAGTATTACTCGATCATACCCCACTCCATTAGGTCCATT
CAGAGCGATCGCAAGGCATGGGCCGCATTCTATGTGTATAAGCTCCAGCCCCTGACCTTCCT
CTTGGATTTCTCCGTGGACGGCTACATCAGAAGGGCTATCGATTGCGGGTTCAACGACCTCA
GCCAGCTGCATTGTTCTTATGAGAGCTTTGACGTGGAAAGCGGAGTTTACTCAGTCTCTTCC
TTTGAGGCTAAACCTTCAGGTAGCGTCGTAGAGCAAGCAGAGGGTGTGGAGTGCGATTTCTC
ACCACTGCTCAGCGGAACCCCACCCCAGGTCTACAACTTTAAGCGGCTCGTGTTCACAAACT
GTAACTATAACTTGACTAAGTTGCTGTCACTCTTTTCCGTGAATGATTTTACATGCTCCCAA
ATCAGCCCAGCCGCTATTGCGTCTAATTGCTATTCCTCATTGATCCTGGATTACTTCAGTTA
CCCCCTCTCTATGAAGAGCGATCTCTCGGTTAGTAGCGCTGGGCCTATTTCCCAGTTTAACT
ACAAACAATCCTTTTCCAATCCAACATGCCTGATCTTAGCTACTGTACCCCACAACCTGACT
ACTATTACGAAGCCACTCAAGTACTCATACATTAATAAGTGCAGCCGATTCCTCAGTGATGA
TCGCACCGAAGTGCCGCAGCTTGTAAACGCGAACCAGTACTCCCCATGCGTCTCTATTGTGC
CTTCTACAGTGTGGGAAGACGGCGATTATTATAGAAAGCAGCTGTCGCCACTGGAAGGTGGC
GGGTGGCTAGTTGCCAGTGGGTCCACAGTTGCCATGACCGAGCAACTTCAGATGGGGTTTGG
CATAACAGTGCAGTATGGTACCGATACGAACAGCGTGTGTCCAAAATTGGAATTTGCTAACG
ACACCAAGATCGCCTCCCAGTTGGGAAATTGTGTTGAATATTCCCTGTACGGAGTGTCAGGC
CGGGGGGTGTTCCAAAATTGCACCGCCGTGGGAGTGAGGCAGCAAAGATTCGTGTACGACGC
ATACCAGAATCTAGTCGGATACTATTCTGACGATGGAAACTACTACTGTCTGCGCGCTTGCG
TCTCAGTGCCCGTGAGTGTCATATATGATAAGGAGACCAAGACTCACGCTACTCTCTTTGGT
TCTGTCGCGTGCGAACACATTTCCTCTACAATGTCCCAGTATAGTCGCTCCACTCGGTCTAT
GTTAAAGCGCAGAGACAGTACCTACGGCCCTCTACAGACACCTGTGGGGTGCGTTCTCGGCC
TTGTCAATTCTAGCCTGTTTGTGGAGGATTGTAAGCTGCCCCTTGGTCAAAGCTTATGCGCA
CTGCCCGATACGCCCAGCACACTTACACCAGCTTCAGTGGGGTCCGTCCCCGGGGAAATGAG
ATTGGCCTCGATCGCTTTCAACCACCCCATACAGGTGGATCAGCTCAACTCGTCATACTTCA
AGCTAAGCATCCCTACTAATTTCTCCTTTGGTGTGACTCAGGAGTACATTCAGACCACAATT
CAAAAGGTGACCGTTGACTGCAAGCAGTATGTGTGCAACGGGTTCCAGAAATGTGAACAGCT
GCTCCGGGAGTATGGCCAGTTCTGTTCTAAAATCAACCAGGCCCTCCACGGAGCAAACCTTA
GGCAGGACGATTCTGTCAGAAACCTCTTTGCCAGCGTCAAGAGTTCTCAGAGTTCCCCTATT
ATACCTGGCTTCGGCGGGGATTTCAACCTGACACTACTTGAACCTGTAAGCATATCAACCGG
AAGTCGCAGTGCCCGTTCCGCCATCGAGGATCTGCTCTTCGACAAAGTAACTATTGCAGATC
CCGGATACATGCAGGGGTATGACGACTGCATGCAGCAGGGTCCAGCCTCTGCAAGGGATCTG
ATATGCGCACAGTATGTCGCTGGGTACAAAGTGTTGCCTCCTCTCATGGACGTGAACATGGA
AGCGGCCTATACCTCCTCACTTCTAGGCTCCATAGCGGGCGTGGGATGGACCGCAGGGCTTT
CAAGCTTCGCCGCAATTCCCTTTGCTCAATCTATCTTCTACAGGCTTAATGGCGTTGGAATC
ACCCAGCAGGTGTTAAGCGAAAACCAGAAATTGATTGCCAATAAGTTTAACCAAGCTTTGGG
GGCCATGCAGACAGGCTTTACAACCACAAACGAGGCTTTCCATAAAGTACAGGATGCGGTAA
ACAATAACGCACAAGCCCTGTCAAAGCTGGCTTCAGAGCTCTCAAATACATTTGGCGCTATA
TCCGCGTCTATCGGCGATATCATACAACGGTTGGACCCACCCGAACAGGACGCACAGATTGA
TCGTTTGATCAACGGGAGGCTTACCACCTTAAACGCTTTTGTGGCCCAGCAACTGGTGCGGT
CTGAGAGCGCCGCCTTGAGCGCTCAGCTGGCAAAGGATAAAGTGAATGAATGCGTGAAAGCT
CAATCAAAGAGAAGTGGGTTTTGTGGGCAGGGTACTCATATTGTTTCCTTTGTGGTGAACGC
CCCAAATGGACTCTACTTTATGCATGTTGGATACTACCCGAGCAACCACATCGAGGTCGTTT
CCGCCTATGGGCTTTGTGACGCAGCAAACCCTACTAACTGTATCGCGCCAGTTAATGGCTAC
TTTATTAAAACAAATAACACACGCATTGTGGATGAATGGAGTTACACAGGGTCCAGCTTCTA
CGCTCCAGAGCCTATCACCTCTCTGAACACAAAGTATGTGGCACCTCAGGTCACATATCAGA
ACATCTCGACAAACCTGCCCCCCCCACTCTTGGGCAACTCCACAGGGATCGACTTCCAGGAC
GAGCTTGACGAATTCTTCAAGAACGTGTCCACCAGTATCCCTAATTTTGGTTCGCTGACCCA
AATTAACACAACCCTGCTCGATCTGACATATGAAATGCTTTCACTACAGCAGGTGGTCAAAG
CGTTGAACGAGTCGTATATCGACCTGAAAGAGTTAGGGAATTACACATACTATAACAAATGG
CCCTGGTATATTTGGTTAGGATTCATTGCCGGGCTGGTGGCCCTTGCCTTGTGCGTATTTTT
CATCTTGtctttatggatgtgctccaatggatcgttacaatgcagaatttgcattTGA
PDI-MERS-H5iCT(V4)-DNA
(SEQ ID NO: 104)
atggcgaaaaacgttgcgattttcggcttattgttttctcttcttgtgttggttccttctca
gatcttcgcgTATGTCGATGTGGGTCCCGATAGTGTTAAGTCCGCCTGCATCGAAGTGGACA
TTCAGCAGACCTTCTTCGATAAGACTTGGCCTCGGCCAATTGATGTGTCCAAGGCCGACGGC
ATTATCTACCCCCAAGGTCGGACATATTCCAACATAACTATCACCTATCAGGGGCTATTCCC
TTATCAGGGCGACCATGGGGACATGTACGTTTACAGCGCTGGTCACGCTACAGGGACGACCC
CCCAGAAGCTCTTCGTGGCGAACTATAGTCAGGACGTGAAACAGTTTGCCAACGGTTTTGTA
GTGCGCATCGGGGCAGCCGCTAACTCCACTGGTACTGTTATTATCAGCCCTTCCACGAGTGC
CACAATTCGAAAGATCTATCCGGCCTTCATGCTAGGATCCTCTGTGGGCAATTTTAGCGACG
GTAAGATGGGTCGGTTCTTCAACCACACGCTTGTGCTGCTTCCCGATGGGTGCGGTACTTTG
CTGAGGGCCTTTTACTGTATCCTAGAGCCCCGATCCGGCAACCACTGCCCCGCCGGGAACTC
GTATACTTCCTTTGCCACTTATCATACTCCAGCCACGGATTGTAGCGATGGGAACTACAATA
GGAACGCCAGTTTGAATTCCTTTAAAGAGTACTTCAACTTGCGGAATTGTACCTTCATGTAT
ACATATAACATTACTGAGGACGAAATTCTCGAATGGTTCGGAATCACTCAAACAGCCCAGGG
AGTGCACCTCTTTAGTTCTCGCTATGTGGACTTATATGGAGGCAATATGTTTCAATTCGCCA
CCTTACCCGTCTACGATACGATCAAGTATTACTCGATCATACCCCACTCCATTAGGTCCATT
CAGAGCGATCGCAAGGCATGGGCCGCATTCTATGTGTATAAGCTCCAGCCCCTGACCTTCCT
CTTGGATTTCTCCGTGGACGGCTACATCAGAAGGGCTATCGATTGCGGGTTCAACGACCTCA
GCCAGCTGCATTGTTCTTATGAGAGCTTTGACGTGGAAAGCGGAGTTTACTCAGTCTCTTCC
TTTGAGGCTAAACCTTCAGGTAGCGTCGTAGAGCAAGCAGAGGGTGTGGAGTGCGATTTCTC
ACCACTGCTCAGCGGAACCCCACCCCAGGTCTACAACTTTAAGCGGCTCGTGTTCACAAACT
GTAACTATAACTTGACTAAGTTGCTGTCACTCTTTTCCGTGAATGATTTTACATGCTCCCAA
ATCAGCCCAGCCGCTATTGCGTCTAATTGCTATTCCTCATTGATCCTGGATTACTTCAGTTA
CCCCCTCTCTATGAAGAGCGATCTCTCGGTTAGTAGCGCTGGGCCTATTTCCCAGTTTAACT
ACAAACAATCCTTTTCCAATCCAACATGCCTGATCTTAGCTACTGTACCCCACAACCTGACT
ACTATTACGAAGCCACTCAAGTACTCATACATTAATAAGTGCAGCCGATTCCTCAGTGATGA
TCGCACCGAAGTGCCGCAGCTTGTAAACGCGAACCAGTACTCCCCATGCGTCTCTATTGTGC
CTTCTACAGTGTGGGAAGACGGCGATTATTATAGAAAGCAGCTGTCGCCACTGGAAGGTGGC
GGGTGGCTAGTTGCCAGTGGGTCCACAGTTGCCATGACCGAGCAACTTCAGATGGGGTTTGG
CATAACAGTGCAGTATGGTACCGATACGAACAGCGTGTGTCCAAAATTGGAATTTGCTAACG
ACACCAAGATCGCCTCCCAGTTGGGAAATTGTGTTGAATATTCCCTGTACGGAGTGTCAGGC
CGGGGGGTGTTCCAAAATTGCACCGCCGTGGGAGTGAGGCAGCAAAGATTCGTGTACGACGC
ATACCAGAATCTAGTCGGATACTATTCTGACGATGGAAACTACTACTGTCTGCGCGCTTGCG
TCTCAGTGCCCGTGAGTGTCATATATGATAAGGAGACCAAGACTCACGCTACTCTCTTTGGT
TCTGTCGCGTGCGAACACATTTCCTCTACAATGTCCCAGTATAGTCGCTCCACTCGGTCTAT
GTTAAAGCGCAGAGACAGTACCTACGGCCCTCTACAGACACCTGTGGGGTGCGTTCTCGGCC
TTGTCAATTCTAGCCTGTTTGTGGAGGATTGTAAGCTGCCCCTTGGTCAAAGCTTATGCGCA
CTGCCCGATACGCCCAGCACACTTACACCAGCTTCAGTGGGGTCCGTCCCCGGGGAAATGAG
ATTGGCCTCGATCGCTTTCAACCACCCCATACAGGTGGATCAGCTCAACTCGTCATACTTCA
AGCTAAGCATCCCTACTAATTTCTCCTTTGGTGTGACTCAGGAGTACATTCAGACCACAATT
CAAAAGGTGACCGTTGACTGCAAGCAGTATGTGTGCAACGGGTTCCAGAAATGTGAACAGCT
GCTCCGGGAGTATGGCCAGTTCTGTTCTAAAATCAACCAGGCCCTCCACGGAGCAAACCTTA
GGCAGGACGATTCTGTCAGAAACCTCTTTGCCAGCGTCAAGAGTTCTCAGAGTTCCCCTATT
ATACCTGGCTTCGGCGGGGATTTCAACCTGACACTACTTGAACCTGTAAGCATATCAACCGG
AAGTCGCAGTGCCCGTTCCGCCATCGAGGATCTGCTCTTCGACAAAGTAACTATTGCAGATC
CCGGATACATGCAGGGGTATGACGACTGCATGCAGCAGGGTCCAGCCTCTGCAAGGGATCTG
ATATGCGCACAGTATGTCGCTGGGTACAAAGTGTTGCCTCCTCTCATGGACGTGAACATGGA
AGCGGCCTATACCTCCTCACTTCTAGGCTCCATAGCGGGCGTGGGATGGACCGCAGGGCTTT
CAAGCTTCGCCGCAATTCCCTTTGCTCAATCTATCTTCTACAGGCTTAATGGCGTTGGAATC
ACCCAGCAGGTGTTAAGCGAAAACCAGAAATTGATTGCCAATAAGTTTAACCAAGCTTTGGG
GGCCATGCAGACAGGCTTTACAACCACAAACGAGGCTTTCCATAAAGTACAGGATGCGGTAA
ACAATAACGCACAAGCCCTGTCAAAGCTGGCTTCAGAGCTCTCAAATACATTTGGCGCTATA
TCCGCGTCTATCGGCGATATCATACAACGGTTGGACCCACCCGAACAGGACGCACAGATTGA
TCGTTTGATCAACGGGAGGCTTACCACCTTAAACGCTTTTGTGGCCCAGCAACTGGTGCGGT
CTGAGAGCGCCGCCTTGAGCGCTCAGCTGGCAAAGGATAAAGTGAATGAATGCGTGAAAGCT
CAATCAAAGAGAAGTGGGTTTTGTGGGCAGGGTACTCATATTGTTTCCTTTGTGGTGAACGC
CCCAAATGGACTCTACTTTATGCATGTTGGATACTACCCGAGCAACCACATCGAGGTCGTTT
CCGCCTATGGGCTTTGTGACGCAGCAAACCCTACTAACTGTATCGCGCCAGTTAATGGCTAC
TTTATTAAAACAAATAACACACGCATTGTGGATGAATGGAGTTACACAGGGTCCAGCTTCTA
CGCTCCAGAGCCTATCACCTCTCTGAACACAAAGTATGTGGCACCTCAGGTCACATATCAGA
ACATCTCGACAAACCTGCCCCCCCCACTCTTGGGCAACTCCACAGGGATCGACTTCCAGGAC
GAGCTTGACGAATTCTTCAAGAACGTGTCCACCAGTATCCCTAATTTTGGTTCGCTGACCCA
AATTAACACAACCCTGCTCGATCTGACATATGAAATGCTTTCACTACAGCAGGTGGTCAAAG
CGTTGAACGAGTCGTATATCGACCTGAAAGAGTTAGGGAATTACACATACTATAACAAATGG
CCCTGGTATATTTGGTTAGGATTCATTGCCGGGCTGGTGGCCCTTGCCTTGTGCGTATTTTT
CATCTTGtgctgctccaatggatcgttacaatgcagaatttgcattTGA
PDI-MERS-H1cCT-DNA
(SEQ ID NO: 105)
atggcgaaaaacgttgcgattttcggcttattgttttctcttcttgtgttggttccttctca
gatcttcgcgTATGTCGATGTGGGTCCCGATAGTGTTAAGTCCGCCTGCATCGAAGTGGACA
TTCAGCAGACCTTCTTCGATAAGACTTGGCCTCGGCCAATTGATGTGTCCAAGGCCGACGGC
ATTATCTACCCCCAAGGTCGGACATATTCCAACATAACTATCACCTATCAGGGGCTATTCCC
TTATCAGGGCGACCATGGGGACATGTACGTTTACAGCGCTGGTCACGCTACAGGGACGACCC
CCCAGAAGCTCTTCGTGGCGAACTATAGTCAGGACGTGAAACAGTTTGCCAACGGTTTTGTA
GTGCGCATCGGGGCAGCCGCTAACTCCACTGGTACTGTTATTATCAGCCCTTCCACGAGTGC
CACAATTCGAAAGATCTATCCGGCCTTCATGCTAGGATCCTCTGTGGGCAATTTTAGCGACG
GTAAGATGGGTCGGTTCTTCAACCACACGCTTGTGCTGCTTCCCGATGGGTGCGGTACTTTG
CTGAGGGCCTTTTACTGTATCCTAGAGCCCCGATCCGGCAACCACTGCCCCGCCGGGAACTC
GTATACTTCCTTTGCCACTTATCATACTCCAGCCACGGATTGTAGCGATGGGAACTACAATA
GGAACGCCAGTTTGAATTCCTTTAAAGAGTACTTCAACTTGCGGAATTGTACCTTCATGTAT
ACATATAACATTACTGAGGACGAAATTCTCGAATGGTTCGGAATCACTCAAACAGCCCAGGG
AGTGCACCTCTTTAGTTCTCGCTATGTGGACTTATATGGAGGCAATATGTTTCAATTCGCCA
CCTTACCCGTCTACGATACGATCAAGTATTACTCGATCATACCCCACTCCATTAGGTCCATT
CAGAGCGATCGCAAGGCATGGGCCGCATTCTATGTGTATAAGCTCCAGCCCCTGACCTTCCT
CTTGGATTTCTCCGTGGACGGCTACATCAGAAGGGCTATCGATTGCGGGTTCAACGACCTCA
GCCAGCTGCATTGTTCTTATGAGAGCTTTGACGTGGAAAGCGGAGTTTACTCAGTCTCTTCC
TTTGAGGCTAAACCTTCAGGTAGCGTCGTAGAGCAAGCAGAGGGTGTGGAGTGCGATTTCTC
ACCACTGCTCAGCGGAACCCCACCCCAGGTCTACAACTTTAAGCGGCTCGTGTTCACAAACT
GTAACTATAACTTGACTAAGTTGCTGTCACTCTTTTCCGTGAATGATTTTACATGCTCCCAA
ATCAGCCCAGCCGCTATTGCGTCTAATTGCTATTCCTCATTGATCCTGGATTACTTCAGTTA
CCCCCTCTCTATGAAGAGCGATCTCTCGGTTAGTAGCGCTGGGCCTATTTCCCAGTTTAACT
ACAAACAATCCTTTTCCAATCCAACATGCCTGATCTTAGCTACTGTACCCCACAACCTGACT
ACTATTACGAAGCCACTCAAGTACTCATACATTAATAAGTGCAGCCGATTCCTCAGTGATGA
TCGCACCGAAGTGCCGCAGCTTGTAAACGCGAACCAGTACTCCCCATGCGTCTCTATTGTGC
CTTCTACAGTGTGGGAAGACGGCGATTATTATAGAAAGCAGCTGTCGCCACTGGAAGGTGGC
GGGTGGCTAGTTGCCAGTGGGTCCACAGTTGCCATGACCGAGCAACTTCAGATGGGGTTTGG
CATAACAGTGCAGTATGGTACCGATACGAACAGCGTGTGTCCAAAATTGGAATTTGCTAACG
ACACCAAGATCGCCTCCCAGTTGGGAAATTGTGTTGAATATTCCCTGTACGGAGTGTCAGGC
CGGGGGGTGTTCCAAAATTGCACCGCCGTGGGAGTGAGGCAGCAAAGATTCGTGTACGACGC
ATACCAGAATCTAGTCGGATACTATTCTGACGATGGAAACTACTACTGTCTGCGCGCTTGCG
TCTCAGTGCCCGTGAGTGTCATATATGATAAGGAGACCAAGACTCACGCTACTCTCTTTGGT
TCTGTCGCGTGCGAACACATTTCCTCTACAATGTCCCAGTATAGTCGCTCCACTCGGTCTAT
GTTAAAGCGCAGAGACAGTACCTACGGCCCTCTACAGACACCTGTGGGGTGCGTTCTCGGCC
TTGTCAATTCTAGCCTGTTTGTGGAGGATTGTAAGCTGCCCCTTGGTCAAAGCTTATGCGCA
CTGCCCGATACGCCCAGCACACTTACACCAGCTTCAGTGGGGTCCGTCCCCGGGGAAATGAG
ATTGGCCTCGATCGCTTTCAACCACCCCATACAGGTGGATCAGCTCAACTCGTCATACTTCA
AGCTAAGCATCCCTACTAATTTCTCCTTTGGTGTGACTCAGGAGTACATTCAGACCACAATT
CAAAAGGTGACCGTTGACTGCAAGCAGTATGTGTGCAACGGGTTCCAGAAATGTGAACAGCT
GCTCCGGGAGTATGGCCAGTTCTGTTCTAAAATCAACCAGGCCCTCCACGGAGCAAACCTTA
GGCAGGACGATTCTGTCAGAAACCTCTTTGCCAGCGTCAAGAGTTCTCAGAGTTCCCCTATT
ATACCTGGCTTCGGCGGGGATTTCAACCTGACACTACTTGAACCTGTAAGCATATCAACCGG
AAGTCGCAGTGCCCGTTCCGCCATCGAGGATCTGCTCTTCGACAAAGTAACTATTGCAGATC
CCGGATACATGCAGGGGTATGACGACTGCATGCAGCAGGGTCCAGCCTCTGCAAGGGATCTG
ATATGCGCACAGTATGTCGCTGGGTACAAAGTGTTGCCTCCTCTCATGGACGTGAACATGGA
AGCGGCCTATACCTCCTCACTTCTAGGCTCCATAGCGGGCGTGGGATGGACCGCAGGGCTTT
CAAGCTTCGCCGCAATTCCCTTTGCTCAATCTATCTTCTACAGGCTTAATGGCGTTGGAATC
ACCCAGCAGGTGTTAAGCGAAAACCAGAAATTGATTGCCAATAAGTTTAACCAAGCTTTGGG
GGCCATGCAGACAGGCTTTACAACCACAAACGAGGCTTTCCATAAAGTACAGGATGCGGTAA
ACAATAACGCACAAGCCCTGTCAAAGCTGGCTTCAGAGCTCTCAAATACATTTGGCGCTATA
TCCGCGTCTATCGGCGATATCATACAACGGTTGGACCCACCCGAACAGGACGCACAGATTGA
TCGTTTGATCAACGGGAGGCTTACCACCTTAAACGCTTTTGTGGCCCAGCAACTGGTGCGGT
CTGAGAGCGCCGCCTTGAGCGCTCAGCTGGCAAAGGATAAAGTGAATGAATGCGTGAAAGCT
CAATCAAAGAGAAGTGGGTTTTGTGGGCAGGGTACTCATATTGTTTCCTTTGTGGTGAACGC
CCCAAATGGACTCTACTTTATGCATGTTGGATACTACCCGAGCAACCACATCGAGGTCGTTT
CCGCCTATGGGCTTTGTGACGCAGCAAACCCTACTAACTGTATCGCGCCAGTTAATGGCTAC
TTTATTAAAACAAATAACACACGCATTGTGGATGAATGGAGTTACACAGGGTCCAGCTTCTA
CGCTCCAGAGCCTATCACCTCTCTGAACACAAAGTATGTGGCACCTCAGGTCACATATCAGA
ACATCTCGACAAACCTGCCCCCCCCACTCTTGGGCAACTCCACAGGGATCGACTTCCAGGAC
GAGCTTGACGAATTCTTCAAGAACGTGTCCACCAGTATCCCTAATTTTGGTTCGCTGACCCA
AATTAACACAACCCTGCTCGATCTGACATATGAAATGCTTTCACTACAGCAGGTGGTCAAAG
CGTTGAACGAGTCGTATATCGACCTGAAAGAGTTAGGGAATTACACATACTATAACAAATGG
CCCTGGTATATTTGGTTAGGATTCATTGCCGGGCTGGTGGCCCTTGCCTTGTGCGTATTTTT
CATCTTGagcttctggatgtgctctaatgggtctctacagtgtagaatatgtattTGA
PDI-MERS-wtTMCT-AA
(SEQ ID NO: 106)
MAKNVAIFGLLFSLLVLVPSQIFAYVDVGPDSVKSACIEVDIQQTFFDKTWPRPIDVSKADG
IIYPQGRTYSNITITYQGLFPYQGDHGDMYVYSAGHATGTTPQKLFVANYSQDVKQFANGFV
VRIGAAANSTGTVIISPSTSATIRKIYPAFMLGSSVGNFSDGKMGRFFNHTLVLLPDGCGTL
LRAFYCILEPRSGNHCPAGNSYTSFATYHTPATDCSDGNYNRNASLNSFKEYFNLRNCTFMY
TYNITEDEILEWFGITQTAQGVHLFSSRYVDLYGGNMFQFATLPVYDTIKYYSIIPHSIRSI
QSDRKAWAAFYVYKLQPLTFLLDFSVDGYIRRAIDCGFNDLSQLHCSYESFDVESGVYSVSS
FEAKPSGSVVEQAEGVECDFSPLLSGTPPQVYNFKRLVFTNCNYNLTKLLSLFSVNDFTCSQ
ISPAAIASNCYSSLILDYFSYPLSMKSDLSVSSAGPISQFNYKQSFSNPTCLILATVPHNLT
TITKPLKYSYINKCSRFLSDDRTEVPQLVNANQYSPCVSIVPSTVWEDGDYYRKQLSPLEGG
GWLVASGSTVAMTEQLQMGFGITVQYGTDTNSVCPKLEFANDTKIASQLGNCVEYSLYGVSG
RGVFQNCTAVGVRQQRFVYDAYQNLVGYYSDDGNYYCLRACVSVPVSVIYDKETKTHATLFG
SVACEHISSTMSQYSRSTRSMLKRRDSTYGPLQTPVGCVLGLVNSSLFVEDCKLPLGQSLCA
LPDTPSTLTPASVGSVPGEMRLASIAFNHPIQVDQLNSSYFKLSIPTNFSFGVTQEYIQTTI
QKVTVDCKQYVCNGFQKCEQLLREYGQFCSKINQALHGANLRQDDSVRNLFASVKSSQSSPI
IPGFGGDFNLTLLEPVSISTGSRSARSAIEDLLFDKVTIADPGYMQGYDDCMQQGPASARDL
ICAQYVAGYKVLPPLMDVNMEAAYTSSLLGSIAGVGWTAGLSSFAAIPFAQSIFYRLNGVGI
TQQVLSENQKLIANKFNQALGAMQTGFTTTNEAFHKVQDAVNNNAQALSKLASELSNTFGAI
SASIGDIIQRLDPPEQDAQIDRLINGRLTTLNAFVAQQLVRSESAALSAQLAKDKVNECVKA
QSKRSGFCGQGTHIVSFVVNAPNGLYFMHVGYYPSNHIEVVSAYGLCDAANPTNCIAPVNGY
FIKTNNTRIVDEWSYTGSSFYAPEPITSLNTKYVAPQVTYQNISTNLPPPLLGNSTGIDFQD
ELDEFFKNVSTSIPNFGSLTQINTTLLDLTYEMLSLQQVVKALNESYIDLKELGNYTYYNKW
PWYIWLGFIAGLVALALCVFFILCCTGCGTNCMGKLKCNRCCDRYEEYDLEPHKVHVH
PDI-MERS-H5iTMCT-AA
(SEQ ID NO: 107)
MAKNVAIFGLLFSLLVLVPSQIFAYVDVGPDSVKSACIEVDIQQTFFDKTWPRPIDVSKADG
IIYPQGRTYSNITITYQGLFPYQGDHGDMYVYSAGHATGTTPQKLFVANYSQDVKQFANGFV
VRIGAAANSTGTVIISPSTSATIRKIYPAFMLGSSVGNFSDGKMGRFFNHTLVLLPDGCGTL
LRAFYCILEPRSGNHCPAGNSYTSFATYHTPATDCSDGNYNRNASLNSFKEYFNLRNCTFMY
TYNITEDEILEWFGITQTAQGVHLFSSRYVDLYGGNMFQFATLPVYDTIKYYSIIPHSIRSI
QSDRKAWAAFYVYKLQPLTFLLDFSVDGYIRRAIDCGFNDLSQLHCSYESFDVESGVYSVSS
FEAKPSGSVVEQAEGVECDFSPLLSGTPPQVYNFKRLVFTNCNYNLTKLLSLFSVNDFTCSQ
ISPAAIASNCYSSLILDYFSYPLSMKSDLSVSSAGPISQFNYKQSFSNPTCLILATVPHNLT
TITKPLKYSYINKCSRFLSDDRTEVPQLVNANQYSPCVSIVPSTVWEDGDYYRKQLSPLEGG
GWLVASGSTVAMTEQLQMGFGITVQYGTDTNSVCPKLEFANDTKIASQLGNCVEYSLYGVSG
RGVFQNCTAVGVRQQRFVYDAYQNLVGYYSDDGNYYCLRACVSVPVSVIYDKETKTHATLFG
SVACEHISSTMSQYSRSTRSMLKRRDSTYGPLQTPVGCVLGLVNSSLFVEDCKLPLGQSLCA
LPDTPSTLTPASVGSVPGEMRLASIAFNHPIQVDQLNSSYFKLSIPTNFSFGVTQEYIQTTI
QKVTVDCKQYVCNGFQKCEQLLREYGQFCSKINQALHGANLRODDSVRNLFASVKSSQSSPI
IPGFGGDFNLTLLEPVSISTGSRSARSAIEDLLFDKVTIADPGYMQGYDDCMQQGPASARDL
ICAQYVAGYKVLPPLMDVNMEAAYTSSLLGSIAGVGWTAGLSSFAAIPFAQSIFYRLNGVGI
TQQVLSENQKLIANKFNQALGAMQTGFTTTNEAFHKVQDAVNNNAQALSKLASELSNTFGAI
SASIGDIIQRLDPPEQDAQIDRLINGRLTTLNAFVAQQLVRSESAALSAQLAKDKVNECVKA
QSKRSGFCGQGTHIVSFVVNAPNGLYFMHVGYYPSNHIEVVSAYGLCDAANPTNCIAPVNGY
FIKTNNTRIVDEWSYTGSSFYAPEPITSLNTKYVAPQVTYQNISTNLPPPLLGNSTGIDFQD
ELDEFFKNVSTSIPNFGSLTQINTTLLDLTYEMLSLQQVVKALNESYIDLKELGNYTYYNKW
PWYQILSIYSTVASSLALAIMMAGLSLWMCSNGSLQCRICI
PDI-MERS-H5iCT-AA
(SEQ ID NO: 108)
MAKNVAIFGLLFSLLVLVPSQIFAYVDVGPDSVKSACIEVDIQQTFFDKTWPRPIDVSKADG
IIYPQGRTYSNITITYQGLFPYQGDHGDMYVYSAGHATGTTPQKLFVANYSQDVKQFANGFV
VRIGAAANSTGTVIISPSTSATIRKIYPAFMLGSSVGNFSDGKMGRFFNHTLVLLPDGCGTL
LRAFYCILEPRSGNHCPAGNSYTSFATYHTPATDCSDGNYNRNASLNSFKEYFNLRNCTFMY
TYNITEDEILEWFGITQTAQGVHLFSSRYVDLYGGNMFQFATLPVYDTIKYYSIIPHSIRSI
QSDRKAWAAFYVYKLQPLTFLLDFSVDGYIRRAIDCGFNDLSQLHCSYESFDVESGVYSVSS
FEAKPSGSVVEQAEGVECDFSPLLSGTPPQVYNFKRLVFTNCNYNLTKLLSLFSVNDFTCSQ
ISPAAIASNCYSSLILDYFSYPLSMKSDLSVSSAGPISQFNYKQSFSNPTCLILATVPHNLT
TITKPLKYSYINKCSRFLSDDRTEVPQLVNANQYSPCVSIVPSTVWEDGDYYRKQLSPLEGG
GWLVASGSTVAMTEQLQMGFGITVQYGTDTNSVCPKLEFANDTKIASQLGNCVEYSLYGVSG
RGVFQNCTAVGVRQQRFVYDAYQNLVGYYSDDGNYYCLRACVSVPVSVIYDKETKTHATLFG
SVACEHISSTMSQYSRSTRSMLKRRDSTYGPLQTPVGCVLGLVNSSLFVEDCKLPLGQSLCA
LPDTPSTLTPASVGSVPGEMRLASIAFNHPIQVDQLNSSYFKLSIPTNFSFGVTQEYIQTTI
QKVTVDCKQYVCNGFQKCEQLLREYGQFCSKINQALHGANLRQDDSVRNLFASVKSSQSSPI
IPGFGGDFNLTLLEPVSISTGSRSARSAIEDLLFDKVTIADPGYMQGYDDCMQQGPASARDL
ICAQYVAGYKVLPPLMDVNMEAAYTSSLLGSIAGVGWTAGLSSFAAIPFAQSIFYRLNGVGI
TQQVLSENQKLIANKFNQALGAMQTGFTTTNEAFHKVQDAVNNNAQALSKLASELSNTFGAI
SASIGDIIQRLDPPEQDAQIDRLINGRLTTLNAFVAQQLVRSESAALSAQLAKDKVNECVKA
QSKRSGFCGQGTHIVSFVVNAPNGLYFMHVGYYPSNHIEVVSAYGLCDAANPTNCIAPVNGY
FIKTNNTRIVDEWSYTGSSFYAPEPITSLNTKYVAPQVTYQNISTNLPPPLLGNSTGIDFQD
ELDEFFKNVSTSIPNFGSLTQINTTLLDLTYEMLSLQQVVKALNESYIDLKELGNYTYYNKW
PWYIWLGFIAGLVALALCVFFILSLWMCSNGSLQCRICI
PDI-MERS-H5iCT(V4)-AA
(SEQ ID NO: 109)
MAKNVAIFGLLFSLLVLVPSQIFAYVDVGPDSVKSACIEVDIQQTFFDKTWPRPIDVSKADG
IIYPQGRTYSNITITYQGLFPYQGDHGDMYVYSAGHATGTTPQKLFVANYSQDVKQFANGFV
VRIGAAANSTGTVIISPSTSATIRKIYPAFMLGSSVGNFSDGKMGRFFNHTLVLLPDGCGTL
LRAFYCILEPRSGNHCPAGNSYTSFATYHTPATDCSDGNYNRNASLNSFKEYFNLRNCTFMY
TYNITEDEILEWFGITQTAQGVHLFSSRYVDLYGGNMFQFATLPVYDTIKYYSIIPHSIRSI
QSDRKAWAAFYVYKLQPLTFLLDFSVDGYIRRAIDCGFNDLSQLHCSYESFDVESGVYSVSS
FEAKPSGSVVEQAEGVECDFSPLLSGTPPQVYNFKRLVFTNCNYNLTKLLSLFSVNDFTCSQ
ISPAAIASNCYSSLILDYFSYPLSMKSDLSVSSAGPISQFNYKQSFSNPTCLILATVPHNLT
TITKPLKYSYINKCSRFLSDDRTEVPQLVNANQYSPCVSIVPSTVWEDGDYYRKQLSPLEGG
GWLVASGSTVAMTEQLQMGFGITVQYGTDTNSVCPKLEFANDTKIASQLGNCVEYSLYGVSG
RGVFQNCTAVGVRQQRFVYDAYQNLVGYYSDDGNYYCLRACVSVPVSVIYDKETKTHATLFG
SVACEHISSTMSQYSRSTRSMLKRRDSTYGPLQTPVGCVLGLVNSSLFVEDCKLPLGQSLCA
LPDTPSTLTPASVGSVPGEMRLASIAFNHPIQVDQLNSSYFKLSIPTNFSFGVTQEYIQTTI
QKVTVDCKQYVCNGFQKCEQLLREYGQFCSKINQALHGANLRODDSVRNLFASVKSSQSSPI
IPGFGGDFNLTLLEPVSISTGSRSARSAIEDLLFDKVTIADPGYMQGYDDCMQQGPASARDL
ICAQYVAGYKVLPPLMDVNMEAAYTSSLLGSIAGVGWTAGLSSFAAIPFAQSIFYRLNGVGI
TQQVLSENQKLIANKFNQALGAMQTGFTTTNEAFHKVQDAVNNNAQALSKLASELSNTFGAI
SASIGDIIQRLDPPEQDAQIDRLINGRLTTLNAFVAQQLVRSESAALSAQLAKDKVNECVKA
QSKRSGFCGQGTHIVSFVVNAPNGLYFMHVGYYPSNHIEVVSAYGLCDAANPTNCIAPVNGY
FIKTNNTRIVDEWSYTGSSFYAPEPITSLNTKYVAPQVTYQNISTNLPPPLLGNSTGIDFQD
ELDEFFKNVSTSIPNFGSLTQINTTLLDLTYEMLSLQQVVKALNESYIDLKELGNYTYYNKW
PWYIWLGFIAGLVALALCVFFILCCSNGSLQCRICI
PDI-MERS-H1cCT-AA
(SEQ ID NO: 110)
MAKNVAIFGLLFSLLVLVPSQIFAYVDVGPDSVKSACIEVDIQQTFFDKTWPRPIDVSKADG
IIYPQGRTYSNITITYQGLFPYQGDHGDMYVYSAGHATGTTPQKLFVANYSQDVKQFANGFV
VRIGAAANSTGTVIISPSTSATIRKIYPAFMLGSSVGNFSDGKMGRFFNHTLVLLPDGCGTL
LRAFYCILEPRSGNHCPAGNSYTSFATYHTPATDCSDGNYNRNASLNSFKEYFNLRNCTFMY
TYNITEDEILEWFGITQTAQGVHLFSSRYVDLYGGNMFQFATLPVYDTIKYYSIIPHSIRSI
QSDRKAWAAFYVYKLQPLTFLLDESVDGYIRRAIDCGFNDLSQLHCSYESFDVESGVYSVSS
FEAKPSGSVVEQAEGVECDFSPLLSGTPPQVYNFKRLVFTNCNYNLTKLLSLFSVNDFTCSQ
ISPAAIASNCYSSLILDYFSYPLSMKSDLSVSSAGPISQFNYKQSFSNPTCLILATVPHNLT
TITKPLKYSYINKCSRFLSDDRTEVPQLVNANQYSPCVSIVPSTVWEDGDYYRKQLSPLEGG
GWLVASGSTVAMTEQLQMGFGITVQYGTDTNSVCPKLEFANDTKIASQLGNCVEYSLYGVSG
RGVFQNCTAVGVRQQRFVYDAYQNLVGYYSDDGNYYCLRACVSVPVSVIYDKETKTHATLFG
SVACEHISSTMSQYSRSTRSMLKRRDSTYGPLQTPVGCVLGLVNSSLFVEDCKLPLGQSLCA
LPDTPSTLTPASVGSVPGEMRLASIAFNHPIQVDQLNSSYFKLSIPTNFSFGVTQEYIQTTI
QKVTVDCKQYVCNGFQKCEQLLREYGQFCSKINQALHGANLRODDSVRNLFASVKSSQSSPI
IPGFGGDFNLTLLEPVSISTGSRSARSAIEDLLFDKVTIADPGYMQGYDDCMQQGPASARDL
ICAQYVAGYKVLPPLMDVNMEAAYTSSLLGSIAGVGWTAGLSSFAAIPFAQSIFYRLNGVGI
TQQVLSENQKLIANKFNQALGAMQTGFTTTNEAFHKVQDAVNNNAQALSKLASELSNTFGAI
SASIGDIIQRLDPPEQDAQIDRLINGRLTTLNAFVAQQLVRSESAALSAQLAKDKVNECVKA
QSKRSGFCGQGTHIVSFVVNAPNGLYFMHVGYYPSNHIEVVSAYGLCDAANPTNCIAPVNGY
FIKTNNTRIVDEWSYTGSSFYAPEPITSLNTKYVAPQVTYQNISTNLPPPLLGNSTGIDFQD
ELDEFFKNVSTSIPNFGSLTQINTTLLDLTYEMLSLQQVVKALNESYIDLKELGNYTYYNKW
PWYIWLGFIAGLVALALCVFFILSFWMCSNGSLQCRICI
Cloning vector 7147 from left to right T-DNA
(SEQ ID NO: 111)
tggcaggatatattgtggtgtaaacaaattgacgcttagacaacttaataacacattgcgga
cgtttttaatgtactgaattaacgccgaatcccgggctggtatatttatatgttgtcaaata
actcaaaaaccataaaagtttaagttagcaagtgtgtacatttttacttgaacaaaaatatt
cacctactactgttataaatcattattaaacattagagtaaagaaatatggatgataagaac
aagagtagtgatattttgacaacaattttgttgcaacatttgagaaaattttgttgttctct
cttttcattggtcaaaaacaatagagagagaaaaaggaagagggagaataaaaacataatgt
gagtatgagagagaaagttgtacaaaagttgtaccaaaatagttgtacaaatatcattgagg
aatttgacaaaagctacacaaataagggttaattgctgtaaataaataaggatgacgcatta
gagagatgtaccattagagaatttttggcaagtcattaaaaagaaagaataaattattttta
aaattaaaagttgagtcatttgattaaacatgtgattatttaatgaattgatgaaagagttg
gattaaagttgtattagtaattagaatttggtgtcaaatttaatttgacatttgatcttttc
ctatatattgccccatagagtcagttaactcatttttatatttcatagatcaaataagagaa
ataacggtatattaatccctccaaaaaaaaaaaacggtatatttactaaaaaatctaagcca
cgtaggaggataacaggatccccgtaggaggataacatccaatccaaccaatcacaacaatc
ctgatgagataacccactttaagcccacgcatctgtggcacatctacattatctaaatcaca
cattcttccacacatctgagccacacaaaaaccaatccacatctttatcacccattctataa
aaaatcacactttgtgagtctacactttgattcccttcaaacacatacaaagagaagagact
aattaattaattaatcatcttgagagaaaatggaacgagctatacaaggaaacgacgctagg
gaacaagctaacagtgaacgttgggatggaggatcaggaggtaccacttctcccttcaaact
tcctgacgaaagtccgagttggactgagtggcggctacataacgatgagacgaattcgaatc
aagataatccccttggtttcaaggaaagctggggtttcgggaaagttgtatttaagagatat
ctcagatacgacaggacggaagcttcactgcacagagtccttggatcttggacgggagattc
ggttaactatgcagcatctcgatttttcggtttcgaccagatcggatgtacctatagtattc
ggtttcgaggagttagtatcaccgtttctggagggtcgcgaactcttcagcatctctgtgag
atggcaattcggtctaagcaagaactgctacagcttgccccaatcgaagtggaaagtaatgt
atcaagaggatgccctgaaggtactcaaaccttcgaaaaagaaagcgagtaagttaaaatgc
ttcttcgtctcctatttataatatggtttgttattgttaattttgttcttgtagaagagctt
aattaatcgttgttgttatgaaatactatttgtatgagatgaactggtgtaatgtaattcat
ttacataagtggagtcagaatcagaatgtttcctccataactaactagacatgaagacctgc
cgcgtacaattgtcttatatttgaacaactaaaattgaacatcttttgccacaactttataa
gtggttaatatagctcaaatatatggtcaagttcaatagattaataatggaaatatcagtta
tcgaaattcattaacaatcaacttaacgttattaactactaattttatatcatcccctttga
taaatgatagtacaccaattaggaaggagcatgctcgcctaggagattgtcgtttcccgcct
tcagtttgcaagctgctctagccgtgtagccaatacgcaaaccgcctctccccgcgcgttgg
gaattactagcgcgtgtcgacaagcttgcatgccggtcaacatggtggagcacgacacactt
gtctactccaaaaatatcaaagatacagtctcagaagaccaaagggcaattgagacttttca
acaaagggtaatatccggaaacctcctcggattccattgcccagctatctgtcactttattg
tgaagatagtggaaaaggaaggtggctcctacaaatgccatcattgcgataaaggaaaggcc
atcgttgaagatgcctctgccgacagtggtcccaaagatggacccccacccacgaggagcat
cgtggaaaaagaagacgttccaaccacgtcttcaaagcaagtggattgatgtgataacatgg
tggagcacgacacacttgtctactccaaaaatatcaaagatacagtctcagaagaccaaagg
gcaattgagacttttcaacaaagggtaatatccggaaacctcctcggattccattgcccagc
tatctgtcactttattgtgaagatagtggaaaaggaaggtggctcctacaaatgccatcatt
gcgataaaggaaaggccatcgttgaagatgcctctgccgacagtggtcccaaagatggaccc
ccacccacgaggagcatcgtggaaaaagaagacgttccaaccacgtcttcaaagcaagtgga
ttgatgtgatatctccactgacgtaagggatgacgcacaatcccactatccttcgcaagacc
cttcctctatataaggaagttcatttcatttggagaggcactccatttgaatctatcaaacc
aaaacacattgagacgtcacgtactcctcagccaaaacgacacccccatctgtctatccact
ggcccctggatctgctgcccaaactaactccatggtgaccctgggatgcctggtcaagggct
atttccctgagccagtgacagtgacctggaactctggatccctgtccagcggtgtgcacacc
ttcccagctgtcctgcagtctgacctctacactctgagcagctcagtgactgtcccctccag
cacctggcccagcgagaccgtcacctgcaacgttgcccacccggccagcagcaccaaggtgg
acaagaaaattgtgcccagggattgtggttgtaagccttgcatatgtacagtcccagaagta
tcatctgtcttcatcttccccccaaagcccaaggatgtgctcaccattactctgactcctaa
ggtcacgtgtgttgtggtagacatcagcaaggatgatcccgaggtccagttcagctggtttg
tagatgatgtggaggtgcacacagctcagacgcaaccccgggaggagcagttcaacagcact
ttccgctcagtcagtgaacttcccatcatgcaccaggactggctcaatggcaaggagacgtc
cagattttggcgatctattcaactgtcgccagttcattggtactggtagtctccctgggggc
aatcagtttctggatgtgctctaatgggtctctacagtgtagaatatgtatttaaaggcctt
agtcgtgtcgtttttcaaataatataatccttttagggttttagttagtttaaattttctgt
tgctcctgtttagcaggtcgtgccttcagcaagcacacaaaaacagagtgtttattttaagt
tgtttgtttagtgattcaaaaaaaaaatcgttcaaacatttggcaataaagtttcttaagat
tgaatcctgttgccggtcttgcgatgattatcatataatttctgttgaattacgttaagcat
gtaataattaacatgtaatgcatgacgttatttatgagatgggtttttatgattagagtccc
gcaattatacatttaatacgcgatagaaaacaaaatatagcgcgcaaactaggataaattat
cgcgcgcggtgtcatctatgttactagatctctagagtctcaagcttggcgcgcccacgtga
ctagtggcactggccgtcgttttacaacgtcgtgactgggaaaaccctggcgttacccaact
taatcgccttgcagcacatccccctttcgccagctggcgtaatagcgaagaggcccgcaccg
atcgcccttcccaacagttgcgcagcctgaatggcgaatgctagagcagcttgagcttggat
cagattgtcgtttcccgccttcagtttaaactatcagtgtttgacaggatatattggcgggt
aaacctaagagaaaagagcgttta
Native SARS-CoV-1 S protein wtTM/CT AA P59594
(SEQ ID NO: 112)
MFIFLLFLTLTSGSDLDRCTTFDDVQAPNYTQHTSSMRGVYYPDEIFRSDTLYLTQDLFLPF
YSNVTGFHTINHTFGNPVIPFKDGIYFAATEKSNVVRGWVFGSTMNNKSQSVIIINNSTNVV
IRACNFELCDNPFFAVSKPMGTQTHTMIFDNAFNCTFEYISDAFSLDVSEKSGNFKHLREFV
FKNKDGFLYVYKGYQPIDVVRDLPSGFNTLKPIFKLPLGINITNFRAILTAFSPAQDIWGTS
AAAYFVGYLKPTTFMLKYDENGTITDAVDCSQNPLAELKCSVKSFEIDKGIYQTSNFRVVPS
GDVVRFPNITNLCPFGEVFNATKFPSVYAWERKKISNCVADYSVLYNSTFFSTFKCYGVSAT
KLNDLCFSNVYADSFVVKGDDVRQIAPGQTGVIADYNYKLPDDFMGCVLAWNTRNIDATSTG
NYNYKYRYLRHGKLRPFERDISNVPFSPDGKPCTPPALNCYWPLNDYGFYTTTGIGYQPYRV
VVLSFELLNAPATVCGPKLSTDLIKNQCVNFNFNGLTGTGVLTPSSKRFQPFQQFGRDVSDF
TDSVRDPKTSEILDISPCSFGGVSVITPGTNASSEVAVLYQDVNCTDVSTAIHADQLTPAWR
IYSTGNNVFQTQAGCLIGAEHVDTSYECDIPIGAGICASYHTVSLLRSTSQKSIVAYTMSLG
ADSSIAYSNNTIAIPTNFSISITTEVMPVSMAKTSVDCNMYICGDSTECANLLLQYGSFCTQ
LNRALSGIAAEQDRNTREVFAQVKQMYKTPTLKYFGGFNFSQILPDPLKPTKRSFIEDLLFN
KVTLADAGFMKQYGECLGDINARDLICAQKFNGLTVLPPLLTDDMIAAYTAALVSGTATAGW
TFGAGAALQIPFAMQMAYRFNGIGVTQNVLYENQKQIANQFNKAISQIQESLTTTSTALGKL
QDVVNQNAQALNTLVKQLSSNFGAISSVLNDILSRLDKVEAEVQIDRLITGRLQSLQTYVTQ
QLIRAAEIRASANLAATKMSECVLGQSKRVDFCGKGYHLMSFPQAAPHGVVFLHVTYVPSQE
RNFTTAPAICHEGKAYFPREGVFVFNGTSWFITQRNFFSPQIITTDNTFVSGNCDVVIGIIN
NTVYDPLQPELDSFKEELDKYFKNHTSPDVDLGDISGINASVVNIQKEIDRLNEVAKNLNES
LIDLQELGKYEQYIKWPWYVWLGFIAGLIAIVMVTILLCCMTSCCSCLKGACSCGSCCKFDE
DDSEPVLKGVKLHYT
Native MERS S protein wtTM/CT AA AFY13307
(SEQ ID NO: 113)
MIHSVFLLMFLLTPTESYVDVGPDSVKSACIEVDIQQTFFDKTWPRPIDVSKADGIIYPQGR
TYSNITITYQGLFPYQGDHGDMYVYSAGHATGTTPQKLFVANYSQDVKQFANGFVVRIGAAA
NSTGTVIISPSTSATIRKIYPAFMLGSSVGNFSDGKMGRFFNHTLVLLPDGCGTLLRAFYCI
LEPRSGNHCPAGNSYTSFATYHTPATDCSDGNYNRNASLNSFKEYFNLRNCTFMYTYNITED
EILEWFGITQTAQGVHLFSSRYVDLYGGNMFQFATLPVYDTIKYYSIIPHSIRSIQSDRKAW
AAFYVYKLQPLTFLLDFSVDGYIRRAIDCGFNDLSQLHCSYESFDVESGVYSVSSFEAKPSG
SVVEQAEGVECDFSPLLSGTPPQVYNFKRLVFTNCNYNLTKLLSLFSVNDFTCSQISPAAIA
SNCYSSLILDYFSYPLSMKSDLSVSSAGPISQFNYKQSFSNPTCLILATVPHNLTTITKPLK
YSYINKCSRFLSDDRTEVPQLVNANQYSPCVSIVPSTVWEDGDYYRKQLSPLEGGGWLVASG
STVAMTEQLQMGFGITVQYGTDTNSVCPKLEFANDTKIASQLGNCVEYSLYGVSGRGVFQNC
TAVGVRQQRFVYDAYQNLVGYYSDDGNYYCLRACVSVPVSVIYDKETKTHATLFGSVACEHI
SSTMSQYSRSTRSMLKRRDSTYGPLQTPVGCVLGLVNSSLFVEDCKLPLGQSLCALPDTPST
LTPRSVRSVPGEMRLASIAFNHPIQVDQLNSSYFKLSIPTNFSFGVTQEYIQTTIQKVTVDC
KQYVCNGFQKCEQLLREYGQFCSKINQALHGANLRQDDSVRNLFASVKSSQSSPIIPGFGGD
FNLTLLEPVSISTGSRSARSAIEDLLFDKVTIADPGYMQGYDDCMQQGPASARDLICAQYVA
GYKVLPPLMDVNMEAAYTSSLLGSIAGVGWTAGLSSFAAIPFAQSIFYRLNGVGITQQVLSE
NQKLIANKFNQALGAMQTGFTTTNEAFHKVQDAVNNNAQALSKLASELSNTFGAISASIGDI
IQRLDVLEQDAQIDRLINGRLTTLNAFVAQQLVRSESAALSAQLAKDKVNECVKAQSKRSGF
CGQGTHIVSFVVNAPNGLYFMHVGYYPSNHIEVVSAYGLCDAANPTNCIAPVNGYFIKTNNT
RIVDEWSYTGSSFYAPEPITSLNTKYVAPQVTYQNISTNLPPPLLGNSTGIDFQDELDEFFK
NVSTSIPNFGSLTQINTTLLDLTYEMLSLQQVVKALNESYIDLKELGNYTYYNKWPWYIWLG
FIAGLVALALCVFFILCCTGCGTNCMGKLKCNRCCDRYEEYDLEPHKVHVH
Native SARS-CoV-1 S protein wtTM/CT AA P59594 without signal peptide
(SEQ ID NO: 114)
SDLDRCTTFDDVQAPNYTQHTSSMRGVYYPDEIFRSDTLYLTQDLFLPFYSNVTGFHTINHT
FGNPVIPFKDGIYFAATEKSNVVRGWVFGSTMNNKSQSVIIINNSTNVVIRACNFELCDNPF
FAVSKPMGTQTHTMIFDNAFNCTFEYISDAFSLDVSEKSGNFKHLREFVFKNKDGFLYVYKG
YQPIDVVRDLPSGFNTLKPIFKLPLGINITNFRAILTAFSPAQDIWGTSAAAYFVGYLKPTT
FMLKYDENGTITDAVDCSQNPLAELKCSVKSFEIDKGIYQTSNFRVVPSGDVVRFPNITNLC
PFGEVFNATKFPSVYAWERKKISNCVADYSVLYNSTFFSTFKCYGVSATKLNDLCFSNVYAD
SFVVKGDDVRQIAPGQTGVIADYNYKLPDDFMGCVLAWNTRNIDATSTGNYNYKYRYLRHGK
LRPFERDISNVPFSPDGKPCTPPALNCYWPLNDYGFYTTTGIGYQPYRVVVLSFELLNAPAT
VCGPKLSTDLIKNQCVNFNFNGLTGTGVLTPSSKRFQPFQQFGRDVSDFTDSVRDPKTSEIL
DISPCSFGGVSVITPGTNASSEVAVLYQDVNCTDVSTAIHADQLTPAWRIYSTGNNVFQTQA
GCLIGAEHVDTSYECDIPIGAGICASYHTVSLLRSTSQKSIVAYTMSLGADSSIAYSNNTIA
IPTNFSISITTEVMPVSMAKTSVDCNMYICGDSTECANLLLQYGSFCTQLNRALSGIAAEQD
RNTREVFAQVKQMYKTPTLKYFGGFNFSQILPDPLKPTKRSFIEDLLFNKVTLADAGFMKQY
GECLGDINARDLICAQKFNGLTVLPPLLTDDMIAAYTAALVSGTATAGWTFGAGAALQIPFA
MQMAYRFNGIGVTQNVLYENQKQIANQFNKAISQIQESLTTTSTALGKLQDVVNQNAQALNT
LVKQLSSNFGAISSVLNDILSRLDKVEAEVQIDRLITGRLQSLQTYVTQQLIRAAEIRASAN
LAATKMSECVLGQSKRVDFCGKGYHLMSFPQAAPHGVVFLHVTYVPSQERNFTTAPAICHEG
KAYFPREGVFVFNGTSWFITQRNFFSPQIITTDNTFVSGNCDVVIGIINNTVYDPLQPELDS
FKEELDKYFKNHTSPDVDLGDISGINASVVNIQKEIDRLNEVAKNLNESLIDLQELGKYEQY
IKWPWYVWLGFIAGLIAIVMVTILLCCMTSCCSCLKGACSCGSCCKFDEDDSEPVLKGVKLH
YT
Native MERS S protein wtTM/CT AA AFY13307 without signal peptide
(SEQ ID NO: 115)
YVDVGPDSVKSACIEVDIQQTFFDKTWPRPIDVSKADGIIYPQGRTYSNITITYQGLFPYQG
DHGDMYVYSAGHATGTTPQKLFVANYSQDVKQFANGFVVRIGAAANSTGTVIISPSTSATIR
KIYPAFMLGSSVGNFSDGKMGRFFNHTLVLLPDGCGTLLRAFYCILEPRSGNHCPAGNSYTS
FATYHTPATDCSDGNYNRNASLNSFKEYFNLRNCTFMYTYNITEDEILEWFGITQTAQGVHL
FSSRYVDLYGGNMFQFATLPVYDTIKYYSIIPHSIRSIQSDRKAWAAFYVYKLQPLTFLLDF
SVDGYIRRAIDCGFNDLSQLHCSYESFDVESGVYSVSSFEAKPSGSVVEQAEGVECDFSPLL
SGTPPQVYNFKRLVFTNCNYNLTKLLSLFSVNDFTCSQISPAAIASNCYSSLILDYFSYPLS
MKSDLSVSSAGPISQFNYKQSFSNPTCLILATVPHNLTTITKPLKYSYINKCSRFLSDDRTE
VPQLVNANQYSPCVSIVPSTVWEDGDYYRKQLSPLEGGGWLVASGSTVAMTEQLQMGFGITV
QYGTDTNSVCPKLEFANDTKIASQLGNCVEYSLYGVSGRGVFQNCTAVGVRQORFVYDAYQN
LVGYYSDDGNYYCLRACVSVPVSVIYDKETKTHATLFGSVACEHISSTMSQYSRSTRSMLKR
RDSTYGPLQTPVGCVLGLVNSSLFVEDCKLPLGQSLCALPDTPSTLTPRSVRSVPGEMRLAS
IAFNHPIQVDQLNSSYFKLSIPTNFSFGVTQEYIQTTIQKVTVDCKQYVCNGFQKCEQLLRE
YGQFCSKINQALHGANLRQDDSVRNLFASVKSSQSSPIIPGFGGDFNLTLLEPVSISTGSRS
ARSAIEDLLFDKVTIADPGYMQGYDDCMQQGPASARDLICAQYVAGYKVLPPLMDVNMEAAY
TSSLLGSIAGVGWTAGLSSFAAIPFAQSIFYRLNGVGITQQVLSENQKLIANKFNQALGAMQ
TGFTTTNEAFHKVQDAVNNNAQALSKLASELSNTFGAISASIGDIIQRLDVLEQDAQIDRLI
NGRLTTLNAFVAQQLVRSESAALSAQLAKDKVNECVKAQSKRSGFCGQGTHIVSFVVNAPNG
LYFMHVGYYPSNHIEVVSAYGLCDAANPTNCIAPVNGYFIKTNNTRIVDEWSYTGSSFYAPE
PITSLNTKYVAPQVTYQNISTNLPPPLLGNSTGIDFQDELDEFFKNVSTSIPNFGSLTQINT
TLLDLTYEMLSLQQVVKALNESYIDLKELGNYTYYNKWPWYIWLGFIAGLVALALCVFFILC
CTGCGTNCMGKLKCNRCCDRYEEYDLEPHKVHVH
TMCT region of modified PDI-SARS-COV-1 wtTMCT-AA
(SEQ ID NO: 116)
WYVWLGFIAGLIAIVMVTILLCCMTSCCSCLKGACSCGSCCKFDEDDSEPVLKGVKLHYT
TMCT region of modified PDI-SARS-COV-1 H5iTMCT-AA
(SEQ ID NO: 117)
WYQILSIYSTVASSLALAIMMAGLSLWMCSNGSLQCRICI
TMCT region of modified PDI-SARS-COV-1 H5iCT-AA
(SEQ ID NO: 118)
WYVWLGFIAGLIAIVMVTILLSLWMCSNGSLQCRICI
TMCT region of modified PDI-SARS-COV-1 H5iCT(V4)-AA
(SEQ ID NO: 119)
WYVWLGFIAGLIAIVMVTILLCCSNGSLQCRICI
TMCT region of modified PDI-SARS-COV-1 HIcCT-AA
(SEQ ID NO: 120)
WYVWLGFIAGLIAIVMVTILLSFWMCSNGSLQCRICI
TMCT region of modified PDI-MERS-wtTMCT-AA
(SEQ ID NO: 121)
WYIWLGFIAGLVALALCVFFILCCTGCGTNCMGKLKCNRCCDRYEEYDLEPHKVHVH
TMCT region of modified PDI-MERS-H5iTMCT-AA
(SEQ ID NO: 122)
WYQILSIYSTVASSLALAIMMAGLSLWMCSNGSLQCRICI
TMCT region of modified PDI-MERS-H5iCT-AA
(SEQ ID NO: 123)
WYIWLGFIAGLVALALCVFFILSLWMCSNGSLQCRICI
TMCT region of modified PDI-MERS-H5iCT(V4)-AA
(SEQ ID NO: 124)
WYIWLGFIAGLVALALCVFFILCCSNGSLQCRICI
TMCT region of modified PDI-MERS-H1cCT-AA
(SEQ ID NO: 125)
WYIWLGFIAGLVALALCVFFILSFWMCSNGSLQCRICI
TMCT region of modified PDI-S-protein + H1 Cal
(SEQ ID NO: 126)
WYIWLGFIAGLIAIVMVTIMLSFWMCSNGSLQCRICI
TMCT region of modified PDI-S-protein + H3 Minn
(SEQ ID NO: 127)
WYIWLGFIAGLIAIVMVTIMLMWACQKGNIRCNICI
TMCT region of modified PDI-S-protein + H6 HK
(SEQ ID NO: 128)
WYIWLGFIAGLIAIVMVTIMLGLWMCSNGSMQCRICI
TMCT region of modified PDI-S-protein + H7 Guangdong
(SEQ ID NO: 129)
WYIWLGFIAGLIAIVMVTIMLVFICVKNGNMRCTICI
TMCT region of modified PDI-S-protein + H9 HK
(SEQ ID NO: 130)
WYIWLGFIAGLIAIVMVTIMLLFWAMSNGSCRCNICI
TMCT region of modified PDI-S-protein + B/ Wash
(SEQ ID NO: 131)
WYIWLGFIAGLIAIVMVTIMLVVYMVSRDNVSCSICL
Consensus Sequence of TM Domain of Coronavirus S-protein
(SEQ ID NO: 132)
WYXWLGFIAGLXAXXX{X}VXXXL ({X} may be absent)
Consensus Sequence of TM Domain of Coronavirus S-protein
(SEQ ID NO: 133)
WY[I/V]WLGFIAGL[V/I]A[L/I][A/V][L/M]{X}V[F/T][F/I)XL (wherein {X} may be C
or absent)
TM/CT Region of Modified SARS-CoV-1 S protein with intervening peptide sequence Xₙ
(SEQ ID NO: 134)
WYVWLGFIAGLIAIVMVTIL - (X)n - CSNGSXXCXICI
TM/CT Region of Modified MERS S protein with intervening peptide sequence Xₙ
(SEQ ID NO: 135)
WYIWLGFIAGLVALALCVFFIL - (X)n - CSNGSXXCXICI
IF(AvB + wtCT-OC43).r
(SEQ ID NO: 136)
ACGACACGACTAAGGCCTTCAGTCGTCATGCGAGGTCTTAATGACAAGC
PDI-OC43-wtTMCT-DNA
(SEQ ID NO: 137)
atggcgaaaaacgttgcgattttcggcttattgttttctcttcttgtgttggttccttctca
gatcttcgcgGTGATCGGCGATCTGAATTGTACCCTGGATCCCCGCCTGAAAGGGAGCTTTA
ACAACCGAGATACAGGACCCCCGTCTATATCCATAGATACAGTGGATGTTACGAACGGGCTC
GGCACCTACTATGTGCTAGACCGAGTTTATTTGAACACCACCTTATTCCTCAATGGATACTA
CCCAACTTCAGGTAGTACTTACAGAAACATGGCGCTGAAGGGTACGGATCTGCTGAGCACCC
TATGGTTTAAACCTCCCTTCCTCTCGGACTTTATTAATGGCATCTTCGCTAAGGTGAAAAAC
ACGAAGGTTTTCAAAGATGGAGTGATGTATTCAGAGTTCCCTGCGATCACCATTGGAAGTAC
CTTCGTGAATACTTCCTATAGCGTGGTGGTTCAACCACGGACAATCAACTCCACCCAGGACG
GCGTCAACAAGCTCCAGGGATTGCTGGAGGTGTCAGTCTGTCAATATAACATGTGTGAGTAC
CCACACACTATCTGTCACCCTAATCTAGGCAACCACTTTAAGGAACTGTGGCACTACGATAC
GGGGGTGGTAAGTTGCTTATATAAGAGAAATTTCACCTATGATGTTAATGCAACGTACCTGT
ACTTTCACTTCTATCAAGAAGGAGGAACTTTCTACGCATATTTCACAGATACCGGCTTTGTG
ACGAAATTCTTATTCAACGTTTACCTCGGAATGGCATTAAGCCATTATTACGTGATGCCTCT
CACTTGCATCAGACGCCCTAAGGATGGTTTTTCTCTGGAGTACTGGGTCACTCCCCTGACAC
CACGGCAGTACCTGCTTGCTTTTAACCAGGACGGTATCATTTTTAATGCCGTCGATTGTATG
AGCGATTTTATGAGCGAGATAAAGTGCAAGACCCAATCTATTGCTCCGCCCACGGGGGTGTA
CGAACTGAATGGTTACACCGTCCAGCCCGTTGCCGATGTATATAGACGGAAACCAGACCTGC
CCAATTGCAACATCGAAGCTTGGTTAAACGATAAGTCAGTGCCCTCCCCCCTCAATTGGGAG
AGGAAGACTTTCTCCAACTGTAATTTCAACATGTCAAGCCTGATGTCTTTCATTCAAGCCGA
TTCGTTCACTTGTAATAATATAGATGCAGCAAAGATCTATGGTATGTGCTTCAGTTCCATCA
CAATAGATAAGTTTGCAATACCAAACCGTCGCAAGGTGGACCTTCAGCTCGGCAACCTGGGC
TATCTGCAGTCCAGCAATTATAGAATAGACACCACCGCCACATCATGTCAGCTGTACTATAA
CCTCCCAGCAGCGAACGTCAGTGTTAGTAGGTTCAATCCTTCTACCTGGAATAAAAGGTTTG
GATTCATCGAAGATAGTGTGTTCGTACCTCAGCCAACAGGAGTGTTCACCAATCACAGCGTG
GTCTACGCCCAACATTGCTTCAAGGCACCCAAAAATTTCTGCCCATGTAGCAGTTGCTCCTG
CCCGGGTAAGAACAATGGGATCGGCACCTGCCCAGCAGGCACCAATTCACTTACATGCGATA
ATCTGTGTACACTGGATCCTATTACACTTAAGGCCCCTGATACCTACAAATGCCCCCAGAGC
AAGAGCCTGGTCGGTATCGGAGAACACTGTTCCGGACTTGCAGTAAAAAGCGACTATTGTGG
AAATAACTCTTGCACTTGTCAGCCACAAGCCTTCCTCGGTTGGTCCGCTGACTCTTGTTTAC
AAGGGGATAAGTGTAACATCTTCGCAAATTTCATCTTACACGATGTGAATAACGGCTTAACA
TGCAGCACAGATCTCCAGAAGGCAAACACAGAGATCGAATTAGGAGTCTGCGTTAATTACGA
TCTCTACGGGATCTCTGGCCAGGGCATCTTCGTGGAGGTTAATGCTACCTACTACAATAGTT
GGCAAAATCTGCTCTACGATAGCAATGGCAACCTCTATGGATTCAGAGACTATATTACTAAC
AGGACGTTCATGATTCACTCGTGCTATTCCGGGCGGGTGTCAGCAGCTTATCACGCAAATTC
TTCAGAGCCAGCTCTGCTATTCCGAAACATAAAATGTAATTACGTGTTCAATAATTCACTGA
CTCGGCAGCTGCAGCCGATTAATTACAGCTTCGACAGCTACCTTGGTTGCGTTGTTAACGCC
TACAACTCCACTGCCATATCAGTTCAGACCTGCGACCTTACTGTGGGCTCTGGCTATTGTGT
CGATTATTCAAAGAACGGGGGGAGCGGGTCCGCAATAACAACTGGCTATAGGTTCACCAATT
TTGAGCCTTTCACCGTGAATAGTGTCAACGATAGCCTGGAGCCTGTCGGAGGTCTTTATGAG
ATACAAATCCCCTCCGAGTTCACAATTGGCAACATGGAAGAGTTCATCCAGACGAGTTCCCC
AAAGGTGACGATCGATTGCGCGGCTTTCGTCTGCGGCGACTACGCCGCATGCAAGTTACAAC
TCGTTGAGTATGGAAGTTTTTGCGATAATATAAACGCAATTCTGACTGAAGTGAACGAACTG
CTGGACACCACTCAGTTGCAGGTGGCAAATTCGCTCATGAACGGCGTGACACTGTCAACCAA
ACTGAAGGACGGTGTCAATTTCAATGTGGATGACATTAACTTCAGCCCCGTACTGGGCTGTT
TGGGTAGTGAGTGTTCTAAGGCTAGCAGCCGCTCCGCCATTGAGGACTTGTTGTTTGATAAA
GTTAAGCTGAGTGACGTTGGATTTGTTGAGGCGTATAATAACTGTACCGGTGGTGCAGAGAT
AAGGGATCTGATCTGTGTCCAGAGTTATAAGGGGATTAAGGTTCTCCCCCCGCTACTCTCGG
AGAATCAGATATCAGGATACACCCTGGCCGCTACCTCAGCCTCGCTGTTTCCCCCTTGGACC
GCTGCCGCCGGTGTCCCATTTTATTTGAATGTGCAGTATCGGATCAACGGTCTGGGAGTGAC
AATGGACGTGCTGTCTCAGAACCAGAAACTGATCGCCAATGCATTCAACAATGCTCTGCACG
CCATCCAGCAAGGGTTTGACGCTACAAATTCTGCCCTCGTAAAAATCCAGGCCGTGGTGAAT
GCTAACGCCGAAGCCCTTAATAATCTGCTCCAGCAGCTTTCTAACCGCTTTGGAGCTATTTC
TGCCTCACTGCAGGAAATTCTATCCAGACTGGATCCCCCTGAGGCAGAAGCCCAAATCGACC
GTCTCATAAACGGCAGACTCACTGCTCTTAACGCCTACGTTAGTCAACAATTGAGCGATTCG
ACCTTGGTGAAATTCAGCGCAGCTCAGGCTATGGAGAAGGTGAACGAGTGCGTGAAGTCACA
GAGCTCCAGAATCAATTTCTGTGGCAATGGGAACCATATCATCTCCTTGGTTCAGAATGCTC
CCTACGGCCTGTATTTCATCCACTTCAACTACGTGCCCACGAAGTACGTTACAGCCAAAGTG
TCCCCCGGACTGTGCATCGCTGGTAACAGGGGCATTGCACCAAAATCCGGCTACTTCGTCAA
TGTCAACAACACATGGATGTATACTGGGAGTGGTTATTATTACCCTGAACCTATAACAGAGA
ACAATGTAGTAGTCATGTCCACATGCGCCGTCAATTATACTAAGGCCCCCTATGTTATGCTC
AACACTTCAATTCCCAATCTCCCGGATTTCAAAGAAGAGCTGGATCAGTGGTTTAAGAATCA
GACATCCGTGGCCCCTGACTTAAGCTTGGATTATATCAATGTGACTTTTTTAGACTTACAGG
TCGAGATGAACCGACTCCAGGAAGCTATAAAAGTACTGAACCACTCCTATATCAATCTGAAA
GATATCGGTACATACGAATATTACGTAAAATGGCCTTGGTATGTGTGGCTACTAATTTGCCT
TGCGGGCGTGGCTATGCTGGTCCTGCTGTTCTTCATTTGCTGCTGTACTGGGTGCGGTACTT
CCTGCTTCAAAAAGTGCGGTGGTTGCTGCGACGACTACACTGGGTACCAGGAGCTTGTCATT
AAGACCTCGCATGACGACTGA
PDI-OC43-H5iTMCT-DNA
(SEQ ID NO: 138)
atggcgaaaaacgttgcgattttcggcttattgttttctcttcttgtgttggttccttctca
gatcttcgcgGTGATCGGCGATCTGAATTGTACCCTGGATCCCCGCCTGAAAGGGAGCTTTA
ACAACCGAGATACAGGACCCCCGTCTATATCCATAGATACAGTGGATGTTACGAACGGGCTC
GGCACCTACTATGTGCTAGACCGAGTTTATTTGAACACCACCTTATTCCTCAATGGATACTA
CCCAACTTCAGGTAGTACTTACAGAAACATGGCGCTGAAGGGTACGGATCTGCTGAGCACCC
TATGGTTTAAACCTCCCTTCCTCTCGGACTTTATTAATGGCATCTTCGCTAAGGTGAAAAAC
ACGAAGGTTTTCAAAGATGGAGTGATGTATTCAGAGTTCCCTGCGATCACCATTGGAAGTAC
CTTCGTGAATACTTCCTATAGCGTGGTGGTTCAACCACGGACAATCAACTCCACCCAGGACG
GCGTCAACAAGCTCCAGGGATTGCTGGAGGTGTCAGTCTGTCAATATAACATGTGTGAGTAC
CCACACACTATCTGTCACCCTAATCTAGGCAACCACTTTAAGGAACTGTGGCACTACGATAC
GGGGGTGGTAAGTTGCTTATATAAGAGAAATTTCACCTATGATGTTAATGCAACGTACCTGT
ACTTTCACTTCTATCAAGAAGGAGGAACTTTCTACGCATATTTCACAGATACCGGCTTTGTG
ACGAAATTCTTATTCAACGTTTACCTCGGAATGGCATTAAGCCATTATTACGTGATGCCTCT
CACTTGCATCAGACGCCCTAAGGATGGTTTTTCTCTGGAGTACTGGGTCACTCCCCTGACAC
CACGGCAGTACCTGCTTGCTTTTAACCAGGACGGTATCATTTTTAATGCCGTCGATTGTATG
AGCGATTTTATGAGCGAGATAAAGTGCAAGACCCAATCTATTGCTCCGCCCACGGGGGTGTA
CGAACTGAATGGTTACACCGTCCAGCCCGTTGCCGATGTATATAGACGGAAACCAGACCTGC
CCAATTGCAACATCGAAGCTTGGTTAAACGATAAGTCAGTGCCCTCCCCCCTCAATTGGGAG
AGGAAGACTTTCTCCAACTGTAATTTCAACATGTCAAGCCTGATGTCTTTCATTCAAGCCGA
TTCGTTCACTTGTAATAATATAGATGCAGCAAAGATCTATGGTATGTGCTTCAGTTCCATCA
CAATAGATAAGTTTGCAATACCAAACCGTCGCAAGGTGGACCTTCAGCTCGGCAACCTGGGC
TATCTGCAGTCCAGCAATTATAGAATAGACACCACCGCCACATCATGTCAGCTGTACTATAA
CCTCCCAGCAGCGAACGTCAGTGTTAGTAGGTTCAATCCTTCTACCTGGAATAAAAGGTTTG
GATTCATCGAAGATAGTGTGTTCGTACCTCAGCCAACAGGAGTGTTCACCAATCACAGCGTG
GTCTACGCCCAACATTGCTTCAAGGCACCCAAAAATTTCTGCCCATGTAGCAGTTGCTCCTG
CCCGGGTAAGAACAATGGGATCGGCACCTGCCCAGCAGGCACCAATTCACTTACATGCGATA
ATCTGTGTACACTGGATCCTATTACACTTAAGGCCCCTGATACCTACAAATGCCCCCAGAGC
AAGAGCCTGGTCGGTATCGGAGAACACTGTTCCGGACTTGCAGTAAAAAGCGACTATTGTGG
AAATAACTCTTGCACTTGTCAGCCACAAGCCTTCCTCGGTTGGTCCGCTGACTCTTGTTTAC
AAGGGGATAAGTGTAACATCTTCGCAAATTTCATCTTACACGATGTGAATAACGGCTTAACA
TGCAGCACAGATCTCCAGAAGGCAAACACAGAGATCGAATTAGGAGTCTGCGTTAATTACGA
TCTCTACGGGATCTCTGGCCAGGGCATCTTCGTGGAGGTTAATGCTACCTACTACAATAGTT
GGCAAAATCTGCTCTACGATAGCAATGGCAACCTCTATGGATTCAGAGACTATATTACTAAC
AGGACGTTCATGATTCACTCGTGCTATTCCGGGCGGGTGTCAGCAGCTTATCACGCAAATTC
TTCAGAGCCAGCTCTGCTATTCCGAAACATAAAATGTAATTACGTGTTCAATAATTCACTGA
CTCGGCAGCTGCAGCCGATTAATTACAGCTTCGACAGCTACCTTGGTTGCGTTGTTAACGCC
TACAACTCCACTGCCATATCAGTTCAGACCTGCGACCTTACTGTGGGCTCTGGCTATTGTGT
CGATTATTCAAAGAACGGGGGGAGCGGGTCCGCAATAACAACTGGCTATAGGTTCACCAATT
TTGAGCCTTTCACCGTGAATAGTGTCAACGATAGCCTGGAGCCTGTCGGAGGTCTTTATGAG
ATACAAATCCCCTCCGAGTTCACAATTGGCAACATGGAAGAGTTCATCCAGACGAGTTCCCC
AAAGGTGACGATCGATTGCGCGGCTTTCGTCTGCGGCGACTACGCCGCATGCAAGTTACAAC
TCGTTGAGTATGGAAGTTTTTGCGATAATATAAACGCAATTCTGACTGAAGTGAACGAACTG
CTGGACACCACTCAGTTGCAGGTGGCAAATTCGCTCATGAACGGCGTGACACTGTCAACCAA
ACTGAAGGACGGTGTCAATTTCAATGTGGATGACATTAACTTCAGCCCCGTACTGGGCTGTT
TGGGTAGTGAGTGTTCTAAGGCTAGCAGCCGCTCCGCCATTGAGGACTTGTTGTTTGATAAA
GTTAAGCTGAGTGACGTTGGATTTGTTGAGGCGTATAATAACTGTACCGGTGGTGCAGAGAT
AAGGGATCTGATCTGTGTCCAGAGTTATAAGGGGATTAAGGTTCTCCCCCCGCTACTCTCGG
AGAATCAGATATCAGGATACACCCTGGCCGCTACCTCAGCCTCGCTGTTTCCCCCTTGGACC
GCTGCCGCCGGTGTCCCATTTTATTTGAATGTGCAGTATCGGATCAACGGTCTGGGAGTGAC
AATGGACGTGCTGTCTCAGAACCAGAAACTGATCGCCAATGCATTCAACAATGCTCTGCACG
CCATCCAGCAAGGGTTTGACGCTACAAATTCTGCCCTCGTAAAAATCCAGGCCGTGGTGAAT
GCTAACGCCGAAGCCCTTAATAATCTGCTCCAGCAGCTTTCTAACCGCTTTGGAGCTATTTC
TGCCTCACTGCAGGAAATTCTATCCAGACTGGATCCCCCTGAGGCAGAAGCCCAAATCGACC
GTCTCATAAACGGCAGACTCACTGCTCTTAACGCCTACGTTAGTCAACAATTGAGCGATTCG
ACCTTGGTGAAATTCAGCGCAGCTCAGGCTATGGAGAAGGTGAACGAGTGCGTGAAGTCACA
GAGCTCCAGAATCAATTTCTGTGGCAATGGGAACCATATCATCTCCTTGGTTCAGAATGCTC
CCTACGGCCTGTATTTCATCCACTTCAACTACGTGCCCACGAAGTACGTTACAGCCAAAGTG
TCCCCCGGACTGTGCATCGCTGGTAACAGGGGCATTGCACCAAAATCCGGCTACTTCGTCAA
TGTCAACAACACATGGATGTATACTGGGAGTGGTTATTATTACCCTGAACCTATAACAGAGA
ACAATGTAGTAGTCATGTCCACATGCGCCGTCAATTATACTAAGGCCCCCTATGTTATGCTC
AACACTTCAATTCCCAATCTCCCGGATTTCAAAGAAGAGCTGGATCAGTGGTTTAAGAATCA
GACATCCGTGGCCCCTGACTTAAGCTTGGATTATATCAATGTGACTTTTTTAGACTTACAGG
TCGAGATGAACCGACTCCAGGAAGCTATAAAAGTACTGAACCACTCCTATATCAATCTGAAA
GATATCGGTACATACGAATATTACGTAAAATGGCCTTGGTATcaaatactgtcaatttattc
aacagtggcgagttccctagcactggcaatcatgatggctggtctatctttatggatgtgct
ccaatggatcgttacaatgcagaatttgcattTGA
PDI-OC43-H5iCT-DNA
(SEQ ID NO: 139)
atggcgaaaaacgttgcgattttcggcttattgttttctcttcttgtgttggttccttctca
gatcttcgcgGTGATCGGCGATCTGAATTGTACCCTGGATCCCCGCCTGAAAGGGAGCTTTA
ACAACCGAGATACAGGACCCCCGTCTATATCCATAGATACAGTGGATGTTACGAACGGGCTC
GGCACCTACTATGTGCTAGACCGAGTTTATTTGAACACCACCTTATTCCTCAATGGATACTA
CCCAACTTCAGGTAGTACTTACAGAAACATGGCGCTGAAGGGTACGGATCTGCTGAGCACCC
TATGGTTTAAACCTCCCTTCCTCTCGGACTTTATTAATGGCATCTTCGCTAAGGTGAAAAAC
ACGAAGGTTTTCAAAGATGGAGTGATGTATTCAGAGTTCCCTGCGATCACCATTGGAAGTAC
CTTCGTGAATACTTCCTATAGCGTGGTGGTTCAACCACGGACAATCAACTCCACCCAGGACG
GCGTCAACAAGCTCCAGGGATTGCTGGAGGTGTCAGTCTGTCAATATAACATGTGTGAGTAC
CCACACACTATCTGTCACCCTAATCTAGGCAACCACTTTAAGGAACTGTGGCACTACGATAC
GGGGGTGGTAAGTTGCTTATATAAGAGAAATTTCACCTATGATGTTAATGCAACGTACCTGT
ACTTTCACTTCTATCAAGAAGGAGGAACTTTCTACGCATATTTCACAGATACCGGCTTTGTG
ACGAAATTCTTATTCAACGTTTACCTCGGAATGGCATTAAGCCATTATTACGTGATGCCTCT
CACTTGCATCAGACGCCCTAAGGATGGTTTTTCTCTGGAGTACTGGGTCACTCCCCTGACAC
CACGGCAGTACCTGCTTGCTTTTAACCAGGACGGTATCATTTTTAATGCCGTCGATTGTATG
AGCGATTTTATGAGCGAGATAAAGTGCAAGACCCAATCTATTGCTCCGCCCACGGGGGTGTA
CGAACTGAATGGTTACACCGTCCAGCCCGTTGCCGATGTATATAGACGGAAACCAGACCTGC
CCAATTGCAACATCGAAGCTTGGTTAAACGATAAGTCAGTGCCCTCCCCCCTCAATTGGGAG
AGGAAGACTTTCTCCAACTGTAATTTCAACATGTCAAGCCTGATGTCTTTCATTCAAGCCGA
TTCGTTCACTTGTAATAATATAGATGCAGCAAAGATCTATGGTATGTGCTTCAGTTCCATCA
CAATAGATAAGTTTGCAATACCAAACCGTCGCAAGGTGGACCTTCAGCTCGGCAACCTGGGC
TATCTGCAGTCCAGCAATTATAGAATAGACACCACCGCCACATCATGTCAGCTGTACTATAA
CCTCCCAGCAGCGAACGTCAGTGTTAGTAGGTTCAATCCTTCTACCTGGAATAAAAGGTTTG
GATTCATCGAAGATAGTGTGTTCGTACCTCAGCCAACAGGAGTGTTCACCAATCACAGCGTG
GTCTACGCCCAACATTGCTTCAAGGCACCCAAAAATTTCTGCCCATGTAGCAGTTGCTCCTG
CCCGGGTAAGAACAATGGGATCGGCACCTGCCCAGCAGGCACCAATTCACTTACATGCGATA
ATCTGTGTACACTGGATCCTATTACACTTAAGGCCCCTGATACCTACAAATGCCCCCAGAGC
AAGAGCCTGGTCGGTATCGGAGAACACTGTTCCGGACTTGCAGTAAAAAGCGACTATTGTGG
AAATAACTCTTGCACTTGTCAGCCACAAGCCTTCCTCGGTTGGTCCGCTGACTCTTGTTTAC
AAGGGGATAAGTGTAACATCTTCGCAAATTTCATCTTACACGATGTGAATAACGGCTTAACA
TGCAGCACAGATCTCCAGAAGGCAAACACAGAGATCGAATTAGGAGTCTGCGTTAATTACGA
TCTCTACGGGATCTCTGGCCAGGGCATCTTCGTGGAGGTTAATGCTACCTACTACAATAGTT
GGCAAAATCTGCTCTACGATAGCAATGGCAACCTCTATGGATTCAGAGACTATATTACTAAC
AGGACGTTCATGATTCACTCGTGCTATTCCGGGCGGGTGTCAGCAGCTTATCACGCAAATTC
TTCAGAGCCAGCTCTGCTATTCCGAAACATAAAATGTAATTACGTGTTCAATAATTCACTGA
CTCGGCAGCTGCAGCCGATTAATTACAGCTTCGACAGCTACCTTGGTTGCGTTGTTAACGCC
TACAACTCCACTGCCATATCAGTTCAGACCTGCGACCTTACTGTGGGCTCTGGCTATTGTGT
CGATTATTCAAAGAACGGGGGGAGCGGGTCCGCAATAACAACTGGCTATAGGTTCACCAATT
TTGAGCCTTTCACCGTGAATAGTGTCAACGATAGCCTGGAGCCTGTCGGAGGTCTTTATGAG
ATACAAATCCCCTCCGAGTTCACAATTGGCAACATGGAAGAGTTCATCCAGACGAGTTCCCC
AAAGGTGACGATCGATTGCGCGGCTTTCGTCTGCGGCGACTACGCCGCATGCAAGTTACAAC
TCGTTGAGTATGGAAGTTTTTGCGATAATATAAACGCAATTCTGACTGAAGTGAACGAACTG
CTGGACACCACTCAGTTGCAGGTGGCAAATTCGCTCATGAACGGCGTGACACTGTCAACCAA
ACTGAAGGACGGTGTCAATTTCAATGTGGATGACATTAACTTCAGCCCCGTACTGGGCTGTT
TGGGTAGTGAGTGTTCTAAGGCTAGCAGCCGCTCCGCCATTGAGGACTTGTTGTTTGATAAA
GTTAAGCTGAGTGACGTTGGATTTGTTGAGGCGTATAATAACTGTACCGGTGGTGCAGAGAT
AAGGGATCTGATCTGTGTCCAGAGTTATAAGGGGATTAAGGTTCTCCCCCCGCTACTCTCGG
AGAATCAGATATCAGGATACACCCTGGCCGCTACCTCAGCCTCGCTGTTTCCCCCTTGGACC
GCTGCCGCCGGTGTCCCATTTTATTTGAATGTGCAGTATCGGATCAACGGTCTGGGAGTGAC
AATGGACGTGCTGTCTCAGAACCAGAAACTGATCGCCAATGCATTCAACAATGCTCTGCACG
CCATCCAGCAAGGGTTTGACGCTACAAATTCTGCCCTCGTAAAAATCCAGGCCGTGGTGAAT
GCTAACGCCGAAGCCCTTAATAATCTGCTCCAGCAGCTTTCTAACCGCTTTGGAGCTATTTC
TGCCTCACTGCAGGAAATTCTATCCAGACTGGATCCCCCTGAGGCAGAAGCCCAAATCGACC
GTCTCATAAACGGCAGACTCACTGCTCTTAACGCCTACGTTAGTCAACAATTGAGCGATTCG
ACCTTGGTGAAATTCAGCGCAGCTCAGGCTATGGAGAAGGTGAACGAGTGCGTGAAGTCACA
GAGCTCCAGAATCAATTTCTGTGGCAATGGGAACCATATCATCTCCTTGGTTCAGAATGCTC
CCTACGGCCTGTATTTCATCCACTTCAACTACGTGCCCACGAAGTACGTTACAGCCAAAGTG
TCCCCCGGACTGTGCATCGCTGGTAACAGGGGCATTGCACCAAAATCCGGCTACTTCGTCAA
TGTCAACAACACATGGATGTATACTGGGAGTGGTTATTATTACCCTGAACCTATAACAGAGA
ACAATGTAGTAGTCATGTCCACATGCGCCGTCAATTATACTAAGGCCCCCTATGTTATGCTC
AACACTTCAATTCCCAATCTCCCGGATTTCAAAGAAGAGCTGGATCAGTGGTTTAAGAATCA
GACATCCGTGGCCCCTGACTTAAGCTTGGATTATATCAATGTGACTTTTTTAGACTTACAGG
TCGAGATGAACCGACTCCAGGAAGCTATAAAAGTACTGAACCACTCCTATATCAATCTGAAA
GATATCGGTACATACGAATATTACGTAAAATGGCCTTGGTATGTGTGGCTACTAATTTGCCT
TGCGGGCGTGGCTATGCTGGTCCTGCTGTTCTTCATTtctttatggatgtgctccaatggat
cgttacaatgcagaatttgcattTGA
PDI-OC43-H5iCT(V4)-DNA
(SEQ ID NO: 140)
atggcgaaaaacgttgcgattttcggcttattgttttctcttcttgtgttggttccttctca
gatcttcgcgGTGATCGGCGATCTGAATTGTACCCTGGATCCCCGCCTGAAAGGGAGCTTTA
ACAACCGAGATACAGGACCCCCGTCTATATCCATAGATACAGTGGATGTTACGAACGGGCTC
GGCACCTACTATGTGCTAGACCGAGTTTATTTGAACACCACCTTATTCCTCAATGGATACTA
CCCAACTTCAGGTAGTACTTACAGAAACATGGCGCTGAAGGGTACGGATCTGCTGAGCACCC
TATGGTTTAAACCTCCCTTCCTCTCGGACTTTATTAATGGCATCTTCGCTAAGGTGAAAAAC
ACGAAGGTTTTCAAAGATGGAGTGATGTATTCAGAGTTCCCTGCGATCACCATTGGAAGTAC
CTTCGTGAATACTTCCTATAGCGTGGTGGTTCAACCACGGACAATCAACTCCACCCAGGACG
GCGTCAACAAGCTCCAGGGATTGCTGGAGGTGTCAGTCTGTCAATATAACATGTGTGAGTAC
CCACACACTATCTGTCACCCTAATCTAGGCAACCACTTTAAGGAACTGTGGCACTACGATAC
GGGGGTGGTAAGTTGCTTATATAAGAGAAATTTCACCTATGATGTTAATGCAACGTACCTGT
ACTTTCACTTCTATCAAGAAGGAGGAACTTTCTACGCATATTTCACAGATACCGGCTTTGTG
ACGAAATTCTTATTCAACGTTTACCTCGGAATGGCATTAAGCCATTATTACGTGATGCCTCT
CACTTGCATCAGACGCCCTAAGGATGGTTTTTCTCTGGAGTACTGGGTCACTCCCCTGACAC
CACGGCAGTACCTGCTTGCTTTTAACCAGGACGGTATCATTTTTAATGCCGTCGATTGTATG
AGCGATTTTATGAGCGAGATAAAGTGCAAGACCCAATCTATTGCTCCGCCCACGGGGGTGTA
CGAACTGAATGGTTACACCGTCCAGCCCGTTGCCGATGTATATAGACGGAAACCAGACCTGC
CCAATTGCAACATCGAAGCTTGGTTAAACGATAAGTCAGTGCCCTCCCCCCTCAATTGGGAG
AGGAAGACTTTCTCCAACTGTAATTTCAACATGTCAAGCCTGATGTCTTTCATTCAAGCCGA
TTCGTTCACTTGTAATAATATAGATGCAGCAAAGATCTATGGTATGTGCTTCAGTTCCATCA
CAATAGATAAGTTTGCAATACCAAACCGTCGCAAGGTGGACCTTCAGCTCGGCAACCTGGGC
TATCTGCAGTCCAGCAATTATAGAATAGACACCACCGCCACATCATGTCAGCTGTACTATAA
CCTCCCAGCAGCGAACGTCAGTGTTAGTAGGTTCAATCCTTCTACCTGGAATAAAAGGTTTG
GATTCATCGAAGATAGTGTGTTCGTACCTCAGCCAACAGGAGTGTTCACCAATCACAGCGTG
GTCTACGCCCAACATTGCTTCAAGGCACCCAAAAATTTCTGCCCATGTAGCAGTTGCTCCTG
CCCGGGTAAGAACAATGGGATCGGCACCTGCCCAGCAGGCACCAATTCACTTACATGCGATA
ATCTGTGTACACTGGATCCTATTACACTTAAGGCCCCTGATACCTACAAATGCCCCCAGAGC
AAGAGCCTGGTCGGTATCGGAGAACACTGTTCCGGACTTGCAGTAAAAAGCGACTATTGTGG
AAATAACTCTTGCACTTGTCAGCCACAAGCCTTCCTCGGTTGGTCCGCTGACTCTTGTTTAC
AAGGGGATAAGTGTAACATCTTCGCAAATTTCATCTTACACGATGTGAATAACGGCTTAACA
TGCAGCACAGATCTCCAGAAGGCAAACACAGAGATCGAATTAGGAGTCTGCGTTAATTACGA
TCTCTACGGGATCTCTGGCCAGGGCATCTTCGTGGAGGTTAATGCTACCTACTACAATAGTT
GGCAAAATCTGCTCTACGATAGCAATGGCAACCTCTATGGATTCAGAGACTATATTACTAAC
AGGACGTTCATGATTCACTCGTGCTATTCCGGGCGGGTGTCAGCAGCTTATCACGCAAATTC
TTCAGAGCCAGCTCTGCTATTCCGAAACATAAAATGTAATTACGTGTTCAATAATTCACTGA
CTCGGCAGCTGCAGCCGATTAATTACAGCTTCGACAGCTACCTTGGTTGCGTTGTTAACGCC
TACAACTCCACTGCCATATCAGTTCAGACCTGCGACCTTACTGTGGGCTCTGGCTATTGTGT
CGATTATTCAAAGAACGGGGGGAGCGGGTCCGCAATAACAACTGGCTATAGGTTCACCAATT
TTGAGCCTTTCACCGTGAATAGTGTCAACGATAGCCTGGAGCCTGTCGGAGGTCTTTATGAG
ATACAAATCCCCTCCGAGTTCACAATTGGCAACATGGAAGAGTTCATCCAGACGAGTTCCCC
AAAGGTGACGATCGATTGCGCGGCTTTCGTCTGCGGCGACTACGCCGCATGCAAGTTACAAC
TCGTTGAGTATGGAAGTTTTTGCGATAATATAAACGCAATTCTGACTGAAGTGAACGAACTG
CTGGACACCACTCAGTTGCAGGTGGCAAATTCGCTCATGAACGGCGTGACACTGTCAACCAA
ACTGAAGGACGGTGTCAATTTCAATGTGGATGACATTAACTTCAGCCCCGTACTGGGCTGTT
TGGGTAGTGAGTGTTCTAAGGCTAGCAGCCGCTCCGCCATTGAGGACTTGTTGTTTGATAAA
GTTAAGCTGAGTGACGTTGGATTTGTTGAGGCGTATAATAACTGTACCGGTGGTGCAGAGAT
AAGGGATCTGATCTGTGTCCAGAGTTATAAGGGGATTAAGGTTCTCCCCCCGCTACTCTCGG
AGAATCAGATATCAGGATACACCCTGGCCGCTACCTCAGCCTCGCTGTTTCCCCCTTGGACC
GCTGCCGCCGGTGTCCCATTTTATTTGAATGTGCAGTATCGGATCAACGGTCTGGGAGTGAC
AATGGACGTGCTGTCTCAGAACCAGAAACTGATCGCCAATGCATTCAACAATGCTCTGCACG
CCATCCAGCAAGGGTTTGACGCTACAAATTCTGCCCTCGTAAAAATCCAGGCCGTGGTGAAT
GCTAACGCCGAAGCCCTTAATAATCTGCTCCAGCAGCTTTCTAACCGCTTTGGAGCTATTTC
TGCCTCACTGCAGGAAATTCTATCCAGACTGGATCCCCCTGAGGCAGAAGCCCAAATCGACC
GTCTCATAAACGGCAGACTCACTGCTCTTAACGCCTACGTTAGTCAACAATTGAGCGATTCG
ACCTTGGTGAAATTCAGCGCAGCTCAGGCTATGGAGAAGGTGAACGAGTGCGTGAAGTCACA
GAGCTCCAGAATCAATTTCTGTGGCAATGGGAACCATATCATCTCCTTGGTTCAGAATGCTC
CCTACGGCCTGTATTTCATCCACTTCAACTACGTGCCCACGAAGTACGTTACAGCCAAAGTG
TCCCCCGGACTGTGCATCGCTGGTAACAGGGGCATTGCACCAAAATCCGGCTACTTCGTCAA
TGTCAACAACACATGGATGTATACTGGGAGTGGTTATTATTACCCTGAACCTATAACAGAGA
ACAATGTAGTAGTCATGTCCACATGCGCCGTCAATTATACTAAGGCCCCCTATGTTATGCTC
AACACTTCAATTCCCAATCTCCCGGATTTCAAAGAAGAGCTGGATCAGTGGTTTAAGAATCA
GACATCCGTGGCCCCTGACTTAAGCTTGGATTATATCAATGTGACTTTTTTAGACTTACAGG
TCGAGATGAACCGACTCCAGGAAGCTATAAAAGTACTGAACCACTCCTATATCAATCTGAAA
GATATCGGTACATACGAATATTACGTAAAATGGCCTTGGTATGTGTGGCTACTAATTTGCCT
TGCGGGCGTGGCTATGCTGGTCCTGCTGTTCTTCATTtgctgctccaatggatcgttacaat
gcagaatttgcattTGA
PDI-OC43-H1cCT-DNA
(SEQ ID NO: 141)
atggcgaaaaacgttgcgattttcggcttattgttttctcttcttgtgttggttccttctca
gatcttcgcgGTGATCGGCGATCTGAATTGTACCCTGGATCCCCGCCTGAAAGGGAGCTTTA
ACAACCGAGATACAGGACCCCCGTCTATATCCATAGATACAGTGGATGTTACGAACGGGCTC
GGCACCTACTATGTGCTAGACCGAGTTTATTTGAACACCACCTTATTCCTCAATGGATACTA
CCCAACTTCAGGTAGTACTTACAGAAACATGGCGCTGAAGGGTACGGATCTGCTGAGCACCC
TATGGTTTAAACCTCCCTTCCTCTCGGACTTTATTAATGGCATCTTCGCTAAGGTGAAAAAC
ACGAAGGTTTTCAAAGATGGAGTGATGTATTCAGAGTTCCCTGCGATCACCATTGGAAGTAC
CTTCGTGAATACTTCCTATAGCGTGGTGGTTCAACCACGGACAATCAACTCCACCCAGGACG
GCGTCAACAAGCTCCAGGGATTGCTGGAGGTGTCAGTCTGTCAATATAACATGTGTGAGTAC
CCACACACTATCTGTCACCCTAATCTAGGCAACCACTTTAAGGAACTGTGGCACTACGATAC
GGGGGTGGTAAGTTGCTTATATAAGAGAAATTTCACCTATGATGTTAATGCAACGTACCTGT
ACTTTCACTTCTATCAAGAAGGAGGAACTTTCTACGCATATTTCACAGATACCGGCTTTGTG
ACGAAATTCTTATTCAACGTTTACCTCGGAATGGCATTAAGCCATTATTACGTGATGCCTCT
CACTTGCATCAGACGCCCTAAGGATGGTTTTTCTCTGGAGTACTGGGTCACTCCCCTGACAC
CACGGCAGTACCTGCTTGCTTTTAACCAGGACGGTATCATTTTTAATGCCGTCGATTGTATG
AGCGATTTTATGAGCGAGATAAAGTGCAAGACCCAATCTATTGCTCCGCCCACGGGGGTGTA
CGAACTGAATGGTTACACCGTCCAGCCCGTTGCCGATGTATATAGACGGAAACCAGACCTGC
CCAATTGCAACATCGAAGCTTGGTTAAACGATAAGTCAGTGCCCTCCCCCCTCAATTGGGAG
AGGAAGACTTTCTCCAACTGTAATTTCAACATGTCAAGCCTGATGTCTTTCATTCAAGCCGA
TTCGTTCACTTGTAATAATATAGATGCAGCAAAGATCTATGGTATGTGCTTCAGTTCCATCA
CAATAGATAAGTTTGCAATACCAAACCGTCGCAAGGTGGACCTTCAGCTCGGCAACCTGGGC
TATCTGCAGTCCAGCAATTATAGAATAGACACCACCGCCACATCATGTCAGCTGTACTATAA
CCTCCCAGCAGCGAACGTCAGTGTTAGTAGGTTCAATCCTTCTACCTGGAATAAAAGGTTTG
GATTCATCGAAGATAGTGTGTTCGTACCTCAGCCAACAGGAGTGTTCACCAATCACAGCGTG
GTCTACGCCCAACATTGCTTCAAGGCACCCAAAAATTTCTGCCCATGTAGCAGTTGCTCCTG
CCCGGGTAAGAACAATGGGATCGGCACCTGCCCAGCAGGCACCAATTCACTTACATGCGATA
ATCTGTGTACACTGGATCCTATTACACTTAAGGCCCCTGATACCTACAAATGCCCCCAGAGC
AAGAGCCTGGTCGGTATCGGAGAACACTGTTCCGGACTTGCAGTAAAAAGCGACTATTGTGG
AAATAACTCTTGCACTTGTCAGCCACAAGCCTTCCTCGGTTGGTCCGCTGACTCTTGTTTAC
AAGGGGATAAGTGTAACATCTTCGCAAATTTCATCTTACACGATGTGAATAACGGCTTAACA
TGCAGCACAGATCTCCAGAAGGCAAACACAGAGATCGAATTAGGAGTCTGCGTTAATTACGA
TCTCTACGGGATCTCTGGCCAGGGCATCTTCGTGGAGGTTAATGCTACCTACTACAATAGTT
GGCAAAATCTGCTCTACGATAGCAATGGCAACCTCTATGGATTCAGAGACTATATTACTAAC
AGGACGTTCATGATTCACTCGTGCTATTCCGGGCGGGTGTCAGCAGCTTATCACGCAAATTC
TTCAGAGCCAGCTCTGCTATTCCGAAACATAAAATGTAATTACGTGTTCAATAATTCACTGA
CTCGGCAGCTGCAGCCGATTAATTACAGCTTCGACAGCTACCTTGGTTGCGTTGTTAACGCC
TACAACTCCACTGCCATATCAGTTCAGACCTGCGACCTTACTGTGGGCTCTGGCTATTGTGT
CGATTATTCAAAGAACGGGGGGAGCGGGTCCGCAATAACAACTGGCTATAGGTTCACCAATT
TTGAGCCTTTCACCGTGAATAGTGTCAACGATAGCCTGGAGCCTGTCGGAGGTCTTTATGAG
ATACAAATCCCCTCCGAGTTCACAATTGGCAACATGGAAGAGTTCATCCAGACGAGTTCCCC
AAAGGTGACGATCGATTGCGCGGCTTTCGTCTGCGGCGACTACGCCGCATGCAAGTTACAAC
TCGTTGAGTATGGAAGTTTTTGCGATAATATAAACGCAATTCTGACTGAAGTGAACGAACTG
CTGGACACCACTCAGTTGCAGGTGGCAAATTCGCTCATGAACGGCGTGACACTGTCAACCAA
ACTGAAGGACGGTGTCAATTTCAATGTGGATGACATTAACTTCAGCCCCGTACTGGGCTGTT
TGGGTAGTGAGTGTTCTAAGGCTAGCAGCCGCTCCGCCATTGAGGACTTGTTGTTTGATAAA
GTTAAGCTGAGTGACGTTGGATTTGTTGAGGCGTATAATAACTGTACCGGTGGTGCAGAGAT
AAGGGATCTGATCTGTGTCCAGAGTTATAAGGGGATTAAGGTTCTCCCCCCGCTACTCTCGG
AGAATCAGATATCAGGATACACCCTGGCCGCTACCTCAGCCTCGCTGTTTCCCCCTTGGACC
GCTGCCGCCGGTGTCCCATTTTATTTGAATGTGCAGTATCGGATCAACGGTCTGGGAGTGAC
AATGGACGTGCTGTCTCAGAACCAGAAACTGATCGCCAATGCATTCAACAATGCTCTGCACG
CCATCCAGCAAGGGTTTGACGCTACAAATTCTGCCCTCGTAAAAATCCAGGCCGTGGTGAAT
GCTAACGCCGAAGCCCTTAATAATCTGCTCCAGCAGCTTTCTAACCGCTTTGGAGCTATTTC
TGCCTCACTGCAGGAAATTCTATCCAGACTGGATCCCCCTGAGGCAGAAGCCCAAATCGACC
GTCTCATAAACGGCAGACTCACTGCTCTTAACGCCTACGTTAGTCAACAATTGAGCGATTCG
ACCTTGGTGAAATTCAGCGCAGCTCAGGCTATGGAGAAGGTGAACGAGTGCGTGAAGTCACA
GAGCTCCAGAATCAATTTCTGTGGCAATGGGAACCATATCATCTCCTTGGTTCAGAATGCTC
CCTACGGCCTGTATTTCATCCACTTCAACTACGTGCCCACGAAGTACGTTACAGCCAAAGTG
TCCCCCGGACTGTGCATCGCTGGTAACAGGGGCATTGCACCAAAATCCGGCTACTTCGTCAA
TGTCAACAACACATGGATGTATACTGGGAGTGGTTATTATTACCCTGAACCTATAACAGAGA
ACAATGTAGTAGTCATGTCCACATGCGCCGTCAATTATACTAAGGCCCCCTATGTTATGCTC
AACACTTCAATTCCCAATCTCCCGGATTTCAAAGAAGAGCTGGATCAGTGGTTTAAGAATCA
GACATCCGTGGCCCCTGACTTAAGCTTGGATTATATCAATGTGACTTTTTTAGACTTACAGG
TCGAGATGAACCGACTCCAGGAAGCTATAAAAGTACTGAACCACTCCTATATCAATCTGAAA
GATATCGGTACATACGAATATTACGTAAAATGGCCTTGGTATGTGTGGCTACTAATTTGCCT
TGCGGGCGTGGCTATGCTGGTCCTGCTGTTCTTCATTagcttctggatgtgctctaatgggt
ctctacagtgtagaatatgtattTGA
PDI-OC43-wtTMCT-AA
(SEQ ID NO: 142)
MAKNVAIFGLLFSLLVLVPSQIFAVIGDLNCTLDPRLKGSFNNRDTGPPSISIDTVDVTNGL
GTYYVLDRVYLNTTLFLNGYYPTSGSTYRNMALKGTDLLSTLWFKPPFLSDFINGIFAKVKN
TKVFKDGVMYSEFPAITIGSTFVNTSYSVVVQPRTINSTQDGVNKLQGLLEVSVCQYNMCEY
PHTICHPNLGNHFKELWHYDTGVVSCLYKRNFTYDVNATYLYFHFYQEGGTFYAYFTDTGFV
TKFLFNVYLGMALSHYYVMPLTCIRRPKDGFSLEYWVTPLTPRQYLLAFNQDGIIFNAVDCM
SDFMSEIKCKTQSIAPPTGVYELNGYTVQPVADVYRRKPDLPNCNIEAWLNDKSVPSPLNWE
RKTFSNCNFNMSSLMSFIQADSFTCNNIDAAKIYGMCFSSITIDKFAIPNRRKVDLQLGNLG
YLQSSNYRIDTTATSCQLYYNLPAANVSVSRFNPSTWNKRFGFIEDSVFVPQPTGVFTNHSV
VYAQHCFKAPKNFCPCSSCSCPGKNNGIGTCPAGTNSLTCDNLCTLDPITLKAPDTYKCPQS
KSLVGIGEHCSGLAVKSDYCGNNSCTCQPQAFLGWSADSCLQGDKCNIFANFILHDVNNGLT
CSTDLQKANTEIELGVCVNYDLYGISGQGIFVEVNATYYNSWQNLLYDSNGNLYGFRDYITN
RTFMIHSCYSGRVSAAYHANSSEPALLFRNIKCNYVFNNSLTRQLQPINYSFDSYLGCVVNA
YNSTAISVQTCDLTVGSGYCVDYSKNGGSGSAITTGYRFTNFEPFTVNSVNDSLEPVGGLYE
IQIPSEFTIGNMEEFIQTSSPKVTIDCAAFVCGDYAACKLQLVEYGSFCDNINAILTEVNEL
LDTTQLQVANSLMNGVTLSTKLKDGVNFNVDDINFSPVLGCLGSECSKASSRSAIEDLLFDK
VKLSDVGFVEAYNNCTGGAEIRDLICVQSYKGIKVLPPLLSENQISGYTLAATSASLFPPWT
AAAGVPFYLNVQYRINGLGVTMDVLSQNQKLIANAFNNALHAIQQGFDATNSALVKIQAVVN
ANAEALNNLLQQLSNRFGAISASLQEILSRLDPPEAEAQIDRLINGRLTALNAYVSQQLSDS
TLVKFSAAQAMEKVNECVKSQSSRINFCGNGNHIISLVQNAPYGLYFIHFNYVPTKYVTAKV
SPGLCIAGNRGIAPKSGYFVNVNNTWMYTGSGYYYPEPITENNVVVMSTCAVNYTKAPYVML
NTSIPNLPDFKEELDQWFKNQTSVAPDLSLDYINVTFLDLQVEMNRLQEAIKVLNHSYINLK
DIGTYEYYVKWPWYVWLLICLAGVAMLVLLFFICCCTGCGTSCFKKCGGCCDDYTGYQELVI
KTSHDD
PDI-OC43-H5iTMCT-AA
(SEQ ID NO: 143)
MAKNVAIFGLLFSLLVLVPSQIFAVIGDLNCTLDPRLKGSFNNRDTGPPSISIDTVDVTNGL
GTYYVLDRVYLNTTLFLNGYYPTSGSTYRNMALKGTDLLSTLWFKPPFLSDFINGIFAKVKN
TKVFKDGVMYSEFPAITIGSTFVNTSYSVVVQPRTINSTQDGVNKLQGLLEVSVCQYNMCEY
PHTICHPNLGNHFKELWHYDTGVVSCLYKRNFTYDVNATYLYFHFYQEGGTFYAYFTDTGFV
TKFLFNVYLGMALSHYYVMPLTCIRRPKDGFSLEYWVTPLTPRQYLLAFNQDGIIFNAVDCM
SDFMSEIKCKTQSIAPPTGVYELNGYTVQPVADVYRRKPDLPNCNIEAWLNDKSVPSPLNWE
RKTFSNCNFNMSSLMSFIQADSFTCNNIDAAKIYGMCFSSITIDKFAIPNRRKVDLQLGNLG
YLQSSNYRIDTTATSCQLYYNLPAANVSVSRFNPSTWNKRFGFIEDSVFVPQPTGVFTNHSV
VYAQHCFKAPKNFCPCSSCSCPGKNNGIGTCPAGTNSLTCDNLCTLDPITLKAPDTYKCPQS
KSLVGIGEHCSGLAVKSDYCGNNSCTCQPQAFLGWSADSCLQGDKCNIFANFILHDVNNGLT
CSTDLQKANTEIELGVCVNYDLYGISGQGIFVEVNATYYNSWQNLLYDSNGNLYGFRDYITN
RTFMIHSCYSGRVSAAYHANSSEPALLFRNIKCNYVFNNSLTRQLQPINYSFDSYLGCVVNA
YNSTAISVQTCDLTVGSGYCVDYSKNGGSGSAITTGYRFTNFEPFTVNSVNDSLEPVGGLYE
IQIPSEFTIGNMEEFIQTSSPKVTIDCAAFVCGDYAACKLQLVEYGSFCDNINAILTEVNEL
LDTTQLQVANSLMNGVTLSTKLKDGVNFNVDDINFSPVLGCLGSECSKASSRSAIEDLLFDK
VKLSDVGFVEAYNNCTGGAEIRDLICVQSYKGIKVLPPLLSENQISGYTLAATSASLFPPWT
AAAGVPFYLNVQYRINGLGVTMDVLSQNQKLIANAFNNALHAIQQGFDATNSALVKIQAVVN
ANAEALNNLLQQLSNRFGAISASLQEILSRLDPPEAEAQIDRLINGRLTALNAYVSQQLSDS
TLVKFSAAQAMEKVNECVKSQSSRINFCGNGNHIISLVQNAPYGLYFIHFNYVPTKYVTAKV
SPGLCIAGNRGIAPKSGYFVNVNNTWMYTGSGYYYPEPITENNVVVMSTCAVNYTKAPYVML
NTSIPNLPDFKEELDQWFKNQTSVAPDLSLDYINVTFLDLQVEMNRLQEAIKVLNHSYINLK
DIGTYEYYVKWPWYQILSIYSTVASSLALAIMMAGLSLWMCSNGSLQCRICI
PDI-OC43-H5iCT-AA
(SEQ ID NO: 144)
MAKNVAIFGLLFSLLVLVPSQIFAVIGDLNCTLDPRLKGSFNNRDTGPPSISIDTVDVTNGL
GTYYVLDRVYLNTTLFLNGYYPTSGSTYRNMALKGTDLLSTLWFKPPFLSDFINGIFAKVKN
TKVFKDGVMYSEFPAITIGSTFVNTSYSVVVQPRTINSTQDGVNKLQGLLEVSVCQYNMCEY
PHTICHPNLGNHFKELWHYDTGVVSCLYKRNFTYDVNATYLYFHFYQEGGTFYAYFTDTGFV
TKFLFNVYLGMALSHYYVMPLTCIRRPKDGFSLEYWVTPLTPRQYLLAFNQDGIIFNAVDCM
SDFMSEIKCKTQSIAPPTGVYELNGYTVQPVADVYRRKPDLPNCNIEAWLNDKSVPSPLNWE
RKTFSNCNFNMSSLMSFIQADSFTCNNIDAAKIYGMCFSSITIDKFAIPNRRKVDLQLGNLG
YLQSSNYRIDTTATSCQLYYNLPAANVSVSRFNPSTWNKRFGFIEDSVFVPQPTGVFTNHSV
VYAQHCFKAPKNFCPCSSCSCPGKNNGIGTCPAGTNSLTCDNLCTLDPITLKAPDTYKCPQS
KSLVGIGEHCSGLAVKSDYCGNNSCTCQPQAFLGWSADSCLQGDKCNIFANFILHDVNNGLT
CSTDLQKANTEIELGVCVNYDLYGISGQGIFVEVNATYYNSWQNLLYDSNGNLYGFRDYITN
RTFMIHSCYSGRVSAAYHANSSEPALLFRNIKCNYVFNNSLTRQLQPINYSFDSYLGCVVNA
YNSTAISVQTCDLTVGSGYCVDYSKNGGSGSAITTGYRFTNFEPFTVNSVNDSLEPVGGLYE
IQIPSEFTIGNMEEFIQTSSPKVTIDCAAFVCGDYAACKLQLVEYGSFCDNINAILTEVNEL
LDTTQLQVANSLMNGVTLSTKLKDGVNFNVDDINFSPVLGCLGSECSKASSRSAIEDLLFDK
VKLSDVGFVEAYNNCTGGAEIRDLICVQSYKGIKVLPPLLSENQISGYTLAATSASLFPPWT
AAAGVPFYLNVQYRLNGLGVTMDVLSQNQKLIANAFNNALHAIQQGFDATNSALVKIQAVVN
ANAEALNNLLQQLSNRFGAISASLQEILSRLDPPEAEAQIDRLINGRLTALNAYVSQQLSDS
TLVKFSAAQAMEKVNECVKSQSSRINFCGNGNHIISLVQNAPYGLYFIHFNYVPTKYVTAKV
SPGLCIAGNRGIAPKSGYFVNVNNTWMYTGSGYYYPEPITENNVVVMSTCAVNYTKAPYVML
NTSIPNLPDFKEELDQWFKNQTSVAPDLSLDYINVTFLDLQVEMNRLQEAIKVLNHSYINLK
DIGTYEYYVKWPWYVWLLICLAGVAMLVLLFFISLWMCSNGSLQCRICI
PDI-OC43-H5iCT(V4)-AA
(SEQ ID NO: 145)
MAKNVAIFGLLFSLLVLVPSQIFAVIGDLNCTLDPRLKGSFNNRDTGPPSISIDTVDVTNGL
GTYYVLDRVYLNTTLFLNGYYPTSGSTYRNMALKGTDLLSTLWFKPPFLSDFINGIFAKVKN
TKVFKDGVMYSEFPAITIGSTFVNTSYSVVVQPRTINSTQDGVNKLQGLLEVSVCQYNMCEY
PHTICHPNLGNHFKELWHYDTGVVSCLYKRNFTYDVNATYLYFHFYQEGGTFYAYFTDTGFV
TKFLFNVYLGMALSHYYVMPLTCIRRPKDGFSLEYWVTPLTPRQYLLAFNQDGIIFNAVDCM
SDFMSEIKCKTQSIAPPTGVYELNGYTVQPVADVYRRKPDLPNCNIEAWLNDKSVPSPLNWE
RKTFSNCNFNMSSLMSFIQADSFTCNNIDAAKIYGMCFSSITIDKFAIPNRRKVDLQLGNLG
YLQSSNYRIDTTATSCQLYYNLPAANVSVSRFNPSTWNKRFGFIEDSVFVPQPTGVFTNHSV
VYAQHCFKAPKNFCPCSSCSCPGKNNGIGTCPAGTNSLTCDNLCTLDPITLKAPDTYKCPQS
KSLVGIGEHCSGLAVKSDYCGNNSCTCQPQAFLGWSADSCLQGDKCNIFANFILHDVNNGLT
CSTDLQKANTEIELGVCVNYDLYGISGQGIFVEVNATYYNSWQNLLYDSNGNLYGFRDYITN
RTFMIHSCYSGRVSAAYHANSSEPALLFRNIKCNYVFNNSLTRQLQPINYSFDSYLGCVVNA
YNSTAISVQTCDLTVGSGYCVDYSKNGGSGSAITTGYRFTNFEPFTVNSVNDSLEPVGGLYE
IQIPSEFTIGNMEEFIQTSSPKVTIDCAAFVCGDYAACKLQLVEYGSFCDNINAILTEVNEL
LDTTQLQVANSLMNGVTLSTKLKDGVNFNVDDINFSPVLGCLGSECSKASSRSAIEDLLFDK
VKLSDVGFVEAYNNCTGGAEIRDLICVQSYKGIKVLPPLLSENQISGYTLAATSASLFPPWT
AAAGVPFYLNVQYRINGLGVTMDVLSQNQKLIANAFNNALHAIQQGFDATNSALVKIQAVVN
ANAEALNNLLQQLSNRFGAISASLQEILSRLDPPEAEAQIDRLINGRLTALNAYVSQQLSDS
TLVKFSAAQAMEKVNECVKSQSSRINFCGNGNHIISLVQNAPYGLYFIHFNYVPTKYVTAKV
SPGLCIAGNRGIAPKSGYFVNVNNTWMYTGSGYYYPEPITENNVVVMSTCAVNYTKAPYVML
NTSIPNLPDFKEELDQWFKNQTSVAPDLSLDYINVTFLDLQVEMNRLQEAIKVLNHSYINLK
DIGTYEYYVKWPWYVWLLICLAGVAMLVLLFFICCSNGSLQCRICI
PDI-OC43-H1cCT-AA
(SEQ ID NO: 146)
MAKNVAIFGLLFSLLVLVPSQIFAVIGDLNCTLDPRLKGSFNNRDTGPPSISIDTVDVTNGL
GTYYVLDRVYLNTTLFLNGYYPTSGSTYRNMALKGTDLLSTLWFKPPFLSDFINGIFAKVKN
TKVFKDGVMYSEFPAITIGSTFVNTSYSVVVQPRTINSTQDGVNKLQGLLEVSVCQYNMCEY
PHTICHPNLGNHFKELWHYDTGVVSCLYKRNFTYDVNATYLYFHFYQEGGTFYAYFTDTGFV
TKFLFNVYLGMALSHYYVMPLTCIRRPKDGFSLEYWVTPLTPRQYLLAFNQDGIIFNAVDCM
SDFMSEIKCKTQSIAPPTGVYELNGYTVQPVADVYRRKPDLPNCNIEAWLNDKSVPSPLNWE
RKTFSNCNFNMSSLMSFIQADSFTCNNIDAAKIYGMCFSSITIDKFAIPNRRKVDLQLGNLG
YLQSSNYRIDTTATSCQLYYNLPAANVSVSRFNPSTWNKRFGFIEDSVFVPQPTGVFTNHSV
VYAQHCFKAPKNFCPCSSCSCPGKNNGIGTCPAGTNSLTCDNLCTLDPITLKAPDTYKCPQS
KSLVGIGEHCSGLAVKSDYCGNNSCTCQPQAFLGWSADSCLQGDKCNIFANFILHDVNNGLT
CSTDLQKANTEIELGVCVNYDLYGISGQGIFVEVNATYYNSWONLLYDSNGNLYGFRDYITN
RTFMIHSCYSGRVSAAYHANSSEPALLFRNIKCNYVFNNSLTRQLQPINYSFDSYLGCVVNA
YNSTAISVQTCDLTVGSGYCVDYSKNGGSGSAITTGYRFTNFEPFTVNSVNDSLEPVGGLYE
IQIPSEFTIGNMEEFIQTSSPKVTIDCAAFVCGDYAACKLQLVEYGSFCDNINAILTEVNEL
LDTTQLQVANSLMNGVTLSTKLKDGVNFNVDDINFSPVLGCLGSECSKASSRSAIEDLLFDK
VKLSDVGFVEAYNNCTGGAEIRDLICVQSYKGIKVLPPLLSENQISGYTLAATSASLFPPWT
AAAGVPFYLNVQYRINGLGVTMDVLSQNQKLIANAFNNALHAIQQGFDATNSALVKIQAVVN
ANAEALNNLLQQLSNRFGAISASLQEILSRLDPPEAEAQIDRLINGRLTALNAYVSQQLSDS
TLVKFSAAQAMEKVNECVKSQSSRINFCGNGNHIISLVQNAPYGLYFIHFNYVPTKYVTAKV
SPGLCIAGNRGIAPKSGYFVNVNNTWMYTGSGYYYPEPITENNVVVMSTCAVNYTKAPYVML
NTSIPNLPDFKEELDQWFKNQTSVAPDLSLDYINVTFLDLQVEMNRLQEAIKVLNHSYINLK
DIGTYEYYVKWPWYVWLLICLAGVAMLVLLFFISFWMCSNGSLQCRICI
IF(CoV229EwtCT).r
(SEQ ID NO: 147)
ACGACACGACTAAGGCCTTCACTGTATGTGGATCTTTTCGACATCGTA
PDI-229E -wtTMCT-DNA
(SEQ ID NO: 148)
atggcgaaaaacgttgcgattttcggcttattgttttctcttcttgtgttggttccttctca
gatcttcgcgCAAACGACTAATGGGCTGAACACCAGTTACAGCGTCTGTAACGGCTGCGTCG
GATATAGCGAGAACGTGTTCGCAGTGGAAAGTGGGGGGTACATTCCTTCCGACTTCGCTTTC
AATAACTGGTTTCTCCTGACTAACACAAGCTCCGTCGTGGATGGCGTGGTCAGGTCCTTTCA
GCCTCTTCTCCTGAATTGCCTGTGGTCTGTGTCCGGGTTAAGATTCACTACAGGCTTCGTAT
ACTTCAACGGGACGGGCCGGGGGGATTGCAAGGGCTTCTCCTCCGACGTGCTGTCAGATGTG
ATCCGTTACAATCTGAACTTCGAAGAGAACTTACGGCGGGGGACAATCCTGTTCAAAACATC
ATATGGCGTAGTCGTATTTTACTGCACCAATAATACCCTGGTGAGTGGGGACGCCCATATTC
CCTTCGGAACAGTGCTGGGTAACTTTTACTGTTTTGTCAACACTACGATCGGAAACGAAACC
ACTAGCGCCTTTGTCGGAGCTCTGCCAAAAACAGTTAGGGAGTTCGTGATCTCTCGGACCGG
TCACTTCTATATCAACGGCTACCGTTATTTTACTTTGGGCAACGTCGAAGCCGTCAATTTTA
ATGTGACAACTGCAGAGACAACTGACTTTTGCACTGTGGCTCTCGCCAGTTATGCCGATGTG
CTGGTGAATGTAAGTCAAACGTCAATTGCCAACATCATCTATTGTAACTCAGTAATCAACCG
GCTCCGCTGTGACCAACTCTCATTCGACGTCCCCGACGGATTCTATTCCACGAGCCCGATTC
AGAGCGTGGAACTGCCAGTTTCCATCGTATCCCTCCCAGTTTACCACAAGCACACTTTTATC
GTTCTCTACGTAGATTTTAAACCCCAGTCAGGAGGAGGGAAATGCTTCAACTGCTACCCGGC
TGGCGTGAACATCACCTTGGCCAATTTTAATGAAACTAAAGGGCCCCTTTGCGTGGATACGT
CACACTTTACCACAAAGTATGTTGCAGTCTATGCTAACGTCGGCAGGTGGTCAGCGTCCATT
AACACAGGCAATTGCCCGTTCTCTTTCGGGAAAGTGAACAACTTCGTGAAGTTTGGAAGTGT
GTGCTTCAGTTTGAAAGACATTCCGGGCGGCTGCGCCATGCCTATTGTGGCTAATTGGGCTT
ATTCCAAGTACTACACCATTGGCTCTCTCTACGTTAGCTGGAGCGACGGTGACGGTATAACG
GGCGTACCACAACCGGTGGAAGGGGTCAGCTCTTTCATGAATGTCACTCTGGACAAGTGTAC
CAAATATAATATATACGATGTGAGTGGAGTGGGCGTTATACGCGTGTCTAACGACACCTTTC
TAAACGGCATAACCTACACAAGCACGTCAGGCAATCTGTTAGGTTTTAAAGACGTCACTAAA
GGCACTATATATAGCATCACCCCATGCAACCCACCTGATCAATTAGTCGTATATCAGCAAGC
TGTTGTGGGTGCTATGCTGTCAGAAAACTTCACCAGCTACGGGTTCTCCAATGTGGTGGAAC
TGCCCAAATTCTTTTACGCTAGCAATGGCACATATAACTGTACTGACGCCGTCTTGACTTAC
AGTTCATTCGGAGTGTGCGCGGACGGCAGCATTATCGCCGTGCAGCCGGCCAATGTCAGCTA
TGATTCCGTTTCCGCCATCGTGACAGCCAACTTGTCGATTCCCTCTAACTGGACAACGTCTG
TCCAAGTCGAATATCTGCAGATCACCTCAACCCCCATAGTAGTCGATTGCTCAACCTACGTC
TGCAACGGTAATGTCAGATGTGTCGAGCTGCTCAAGCAGTACACCTCCGCCTGTAAGACTAT
TGAGGATGCATTAAGAAATAGTGCAAGATTGGAAAGCGCCGATGTGTCGGAAATGCTAACCT
TCGATAAGAAGGCATTCACACTGGCGAACGTAAGCTCTTTCGGCGATTACAACCTGTCTTCG
GTAATCCCTAGCTTGCCCACATCCGGCTCTCGGGTGGCGGGGCGGAGCGCTATCGAGGACAT
TTTATTCTCGAAACTGGTTACATCTGGGCTCGGAACTGTGGACGCCGATTACAAGAAGTGCA
CCAAGGGCCTAAGCATCGCCGACCTCGCCTGTGCTCAGTACTACAACGGAATTATGGTGCTG
CCAGGTGTCGCTGACGCAGAGCGGATGGCTATGTATACCGGCAGTCTCATTGGCGGGATTGC
GTTGGGCGGCCTGACGTCCGCTGTCTCCATCCCTTTCTCTCTGGCTATACAAGCCCGACTGA
ATTATGTGGCCCTGCAGACTGATGTCCTGCAAGAAAATCAGAAGATTCTTGCCGCCAGCTTC
AACAAGGCCATGACTAATATTGTGGATGCGTTTACCGGAGTGAATGACGCCATCACCCAAAC
GTCCCAAGCCCTGCAGACAGTCGCCACGGCGTTAAACAAAATCCAGGATGTAGTGAATCAGC
AAGGGAACAGCTTGAATCACCTGACGTCCCAGTTAAGACAGAACTTTCAGGCAATCAGTAGC
TCAATCCAGGCTATCTACGATCGATTAGATCCTCCTCAGGCAGATCAGCAGGTGGATCGGCT
CATCACCGGCCGCCTCGCGGCATTGAATGTTTTCGTAAGTCATACCTTGACCAAGTACACGG
AGGTGAGGGCCAGTCGCCAGCTGGCTCAGCAAAAAGTGAATGAGTGTGTGAAATCACAGAGC
AAACGGTACGGGTTTTGTGGAAATGGGACGCACATCTTTAGCATCGTTAATGCTGCCCCCGA
AGGGTTAGTCTTCCTGCACACTGTGCTCCTTCCTACCCAGTATAAAGATGTCGAAGCATGGT
CTGGGCTCTGTGTCGATGGAACTAACGGTTATGTCCTTCGACAGCCAAACCTCGCTCTCTAT
AAAGAAGGGAATTACTATAGGATCACCTCAAGAATCATGTTCGAGCCCAGGATACCAACAAT
GGCCGATTTTGTGCAGATTGAAAATTGTAACGTGACCTTTGTGAATATCAGTCGATCCGAGC
TTCAAACGATTGTTCCTGAGTACATCGACGTGAATAAAACTCTACAAGAGCTGTCCTATAAA
CTGCCTAATTATACCGTGCCTGACCTTGTAGTCGAGCAATACAACCAGACTATTCTGAACCT
GACATCGGAAATCTCTACATTGGAGAATAAAAGCGCCGAGCTCAATTACACAGTGCAGAAGC
TGCAGACCCTGATCGACAATATTAACAGCACTCTTGTGGACTTAAAGTGGCTGAACCGTGTG
GAGACTTACATCAAGTGGCCCTGGTGGGTGTGGCTCTGTATTTCCGTGGTCCTTATATTTGT
TGTAAGTATGCTGCTCCTGTGCTGTTGCTCAACCGGGTGCTGCGGTTTTTTCTCCTGTTTCG
CCTCATCCATCCGTGGCTGTTGTGAGAGCACTAAACTGCCATATTACGATGTCGAAAAGATC
CACATACAGTGA
PDI-229E -H5iTMCT-DNA
(SEQ ID NO: 149)
atggcgaaaaacgttgcgattttcggcttattgttttctcttcttgtgttggttccttctca
gatcttcgcgCAAACGACTAATGGGCTGAACACCAGTTACAGCGTCTGTAACGGCTGCGTCG
GATATAGCGAGAACGTGTTCGCAGTGGAAAGTGGGGGGTACATTCCTTCCGACTTCGCTTTC
AATAACTGGTTTCTCCTGACTAACACAAGCTCCGTCGTGGATGGCGTGGTCAGGTCCTTTCA
GCCTCTTCTCCTGAATTGCCTGTGGTCTGTGTCCGGGTTAAGATTCACTACAGGCTTCGTAT
ACTTCAACGGGACGGGCCGGGGGGATTGCAAGGGCTTCTCCTCCGACGTGCTGTCAGATGTG
ATCCGTTACAATCTGAACTTCGAAGAGAACTTACGGCGGGGGACAATCCTGTTCAAAACATC
ATATGGCGTAGTCGTATTTTACTGCACCAATAATACCCTGGTGAGTGGGGACGCCCATATTC
CCTTCGGAACAGTGCTGGGTAACTTTTACTGTTTTGTCAACACTACGATCGGAAACGAAACC
ACTAGCGCCTTTGTCGGAGCTCTGCCAAAAACAGTTAGGGAGTTCGTGATCTCTCGGACCGG
TCACTTCTATATCAACGGCTACCGTTATTTTACTTTGGGCAACGTCGAAGCCGTCAATTTTA
ATGTGACAACTGCAGAGACAACTGACTTTTGCACTGTGGCTCTCGCCAGTTATGCCGATGTG
CTGGTGAATGTAAGTCAAACGTCAATTGCCAACATCATCTATTGTAACTCAGTAATCAACCG
GCTCCGCTGTGACCAACTCTCATTCGACGTCCCCGACGGATTCTATTCCACGAGCCCGATTC
AGAGCGTGGAACTGCCAGTTTCCATCGTATCCCTCCCAGTTTACCACAAGCACACTTTTATC
GTTCTCTACGTAGATTTTAAACCCCAGTCAGGAGGAGGGAAATGCTTCAACTGCTACCCGGC
TGGCGTGAACATCACCTTGGCCAATTTTAATGAAACTAAAGGGCCCCTTTGCGTGGATACGT
CACACTTTACCACAAAGTATGTTGCAGTCTATGCTAACGTCGGCAGGTGGTCAGCGTCCATT
AACACAGGCAATTGCCCGTTCTCTTTCGGGAAAGTGAACAACTTCGTGAAGTTTGGAAGTGT
GTGCTTCAGTTTGAAAGACATTCCGGGCGGCTGCGCCATGCCTATTGTGGCTAATTGGGCTT
ATTCCAAGTACTACACCATTGGCTCTCTCTACGTTAGCTGGAGCGACGGTGACGGTATAACG
GGCGTACCACAACCGGTGGAAGGGGTCAGCTCTTTCATGAATGTCACTCTGGACAAGTGTAC
CAAATATAATATATACGATGTGAGTGGAGTGGGCGTTATACGCGTGTCTAACGACACCTTTC
TAAACGGCATAACCTACACAAGCACGTCAGGCAATCTGTTAGGTTTTAAAGACGTCACTAAA
GGCACTATATATAGCATCACCCCATGCAACCCACCTGATCAATTAGTCGTATATCAGCAAGC
TGTTGTGGGTGCTATGCTGTCAGAAAACTTCACCAGCTACGGGTTCTCCAATGTGGTGGAAC
TGCCCAAATTCTTTTACGCTAGCAATGGCACATATAACTGTACTGACGCCGTCTTGACTTAC
AGTTCATTCGGAGTGTGCGCGGACGGCAGCATTATCGCCGTGCAGCCGGCCAATGTCAGCTA
TGATTCCGTTTCCGCCATCGTGACAGCCAACTTGTCGATTCCCTCTAACTGGACAACGTCTG
TCCAAGTCGAATATCTGCAGATCACCTCAACCCCCATAGTAGTCGATTGCTCAACCTACGTC
TGCAACGGTAATGTCAGATGTGTCGAGCTGCTCAAGCAGTACACCTCCGCCTGTAAGACTAT
TGAGGATGCATTAAGAAATAGTGCAAGATTGGAAAGCGCCGATGTGTCGGAAATGCTAACCT
TCGATAAGAAGGCATTCACACTGGCGAACGTAAGCTCTTTCGGCGATTACAACCTGTCTTCG
GTAATCCCTAGCTTGCCCACATCCGGCTCTCGGGTGGCGGGGCGGAGCGCTATCGAGGACAT
TTTATTCTCGAAACTGGTTACATCTGGGCTCGGAACTGTGGACGCCGATTACAAGAAGTGCA
CCAAGGGCCTAAGCATCGCCGACCTCGCCTGTGCTCAGTACTACAACGGAATTATGGTGCTG
CCAGGTGTCGCTGACGCAGAGCGGATGGCTATGTATACCGGCAGTCTCATTGGCGGGATTGC
GTTGGGCGGCCTGACGTCCGCTGTCTCCATCCCTTTCTCTCTGGCTATACAAGCCCGACTGA
ATTATGTGGCCCTGCAGACTGATGTCCTGCAAGAAAATCAGAAGATTCTTGCCGCCAGCTTC
AACAAGGCCATGACTAATATTGTGGATGCGTTTACCGGAGTGAATGACGCCATCACCCAAAC
GTCCCAAGCCCTGCAGACAGTCGCCACGGCGTTAAACAAAATCCAGGATGTAGTGAATCAGC
AAGGGAACAGCTTGAATCACCTGACGTCCCAGTTAAGACAGAACTTTCAGGCAATCAGTAGC
TCAATCCAGGCTATCTACGATCGATTAGATCCTCCTCAGGCAGATCAGCAGGTGGATCGGCT
CATCACCGGCCGCCTCGCGGCATTGAATGTTTTCGTAAGTCATACCTTGACCAAGTACACGG
AGGTGAGGGCCAGTCGCCAGCTGGCTCAGCAAAAAGTGAATGAGTGTGTGAAATCACAGAGC
AAACGGTACGGGTTTTGTGGAAATGGGACGCACATCTTTAGCATCGTTAATGCTGCCCCCGA
AGGGTTAGTCTTCCTGCACACTGTGCTCCTTCCTACCCAGTATAAAGATGTCGAAGCATGGT
CTGGGCTCTGTGTCGATGGAACTAACGGTTATGTCCTTCGACAGCCAAACCTCGCTCTCTAT
AAAGAAGGGAATTACTATAGGATCACCTCAAGAATCATGTTCGAGCCCAGGATACCAACAAT
GGCCGATTTTGTGCAGATTGAAAATTGTAACGTGACCTTTGTGAATATCAGTCGATCCGAGC
TTCAAACGATTGTTCCTGAGTACATCGACGTGAATAAAACTCTACAAGAGCTGTCCTATAAA
CTGCCTAATTATACCGTGCCTGACCTTGTAGTCGAGCAATACAACCAGACTATTCTGAACCT
GACATCGGAAATCTCTACATTGGAGAATAAAAGCGCCGAGCTCAATTACACAGTGCAGAAGC
TGCAGACCCTGATCGACAATATTAACAGCACTCTTGTGGACTTAAAGTGGCTGAACCGTGTG
GAGACTTACATCAAGTGGCCCTGGTGGcaaatactgtcaatttattcaacagtggcgagttc
cctagcactggcaatcatgatggctggtctatctttatggatgtgctccaatggatcgttac
aatgcagaatttgcattTGA
PDI-229E -H5iCT-DNA
(SEQ ID NO: 150)
atggcgaaaaacgttgcgattttcggcttattgttttctcttcttgtgttggttccttctca
gatcttcgcgCAAACGACTAATGGGCTGAACACCAGTTACAGCGTCTGTAACGGCTGCGTCG
GATATAGCGAGAACGTGTTCGCAGTGGAAAGTGGGGGGTACATTCCTTCCGACTTCGCTTTC
AATAACTGGTTTCTCCTGACTAACACAAGCTCCGTCGTGGATGGCGTGGTCAGGTCCTTTCA
GCCTCTTCTCCTGAATTGCCTGTGGTCTGTGTCCGGGTTAAGATTCACTACAGGCTTCGTAT
ACTTCAACGGGACGGGCCGGGGGGATTGCAAGGGCTTCTCCTCCGACGTGCTGTCAGATGTG
ATCCGTTACAATCTGAACTTCGAAGAGAACTTACGGCGGGGGACAATCCTGTTCAAAACATC
ATATGGCGTAGTCGTATTTTACTGCACCAATAATACCCTGGTGAGTGGGGACGCCCATATTC
CCTTCGGAACAGTGCTGGGTAACTTTTACTGTTTTGTCAACACTACGATCGGAAACGAAACC
ACTAGCGCCTTTGTCGGAGCTCTGCCAAAAACAGTTAGGGAGTTCGTGATCTCTCGGACCGG
TCACTTCTATATCAACGGCTACCGTTATTTTACTTTGGGCAACGTCGAAGCCGTCAATTTTA
ATGTGACAACTGCAGAGACAACTGACTTTTGCACTGTGGCTCTCGCCAGTTATGCCGATGTG
CTGGTGAATGTAAGTCAAACGTCAATTGCCAACATCATCTATTGTAACTCAGTAATCAACCG
GCTCCGCTGTGACCAACTCTCATTCGACGTCCCCGACGGATTCTATTCCACGAGCCCGATTC
AGAGCGTGGAACTGCCAGTTTCCATCGTATCCCTCCCAGTTTACCACAAGCACACTTTTATC
GTTCTCTACGTAGATTTTAAACCCCAGTCAGGAGGAGGGAAATGCTTCAACTGCTACCCGGC
TGGCGTGAACATCACCTTGGCCAATTTTAATGAAACTAAAGGGCCCCTTTGCGTGGATACGT
CACACTTTACCACAAAGTATGTTGCAGTCTATGCTAACGTCGGCAGGTGGTCAGCGTCCATT
AACACAGGCAATTGCCCGTTCTCTTTCGGGAAAGTGAACAACTTCGTGAAGTTTGGAAGTGT
GTGCTTCAGTTTGAAAGACATTCCGGGCGGCTGCGCCATGCCTATTGTGGCTAATTGGGCTT
ATTCCAAGTACTACACCATTGGCTCTCTCTACGTTAGCTGGAGCGACGGTGACGGTATAACG
GGCGTACCACAACCGGTGGAAGGGGTCAGCTCTTTCATGAATGTCACTCTGGACAAGTGTAC
CAAATATAATATATACGATGTGAGTGGAGTGGGCGTTATACGCGTGTCTAACGACACCTTTC
TAAACGGCATAACCTACACAAGCACGTCAGGCAATCTGTTAGGTTTTAAAGACGTCACTAAA
GGCACTATATATAGCATCACCCCATGCAACCCACCTGATCAATTAGTCGTATATCAGCAAGC
TGTTGTGGGTGCTATGCTGTCAGAAAACTTCACCAGCTACGGGTTCTCCAATGTGGTGGAAC
TGCCCAAATTCTTTTACGCTAGCAATGGCACATATAACTGTACTGACGCCGTCTTGACTTAC
AGTTCATTCGGAGTGTGCGCGGACGGCAGCATTATCGCCGTGCAGCCGGCCAATGTCAGCTA
TGATTCCGTTTCCGCCATCGTGACAGCCAACTTGTCGATTCCCTCTAACTGGACAACGTCTG
TCCAAGTCGAATATCTGCAGATCACCTCAACCCCCATAGTAGTCGATTGCTCAACCTACGTC
TGCAACGGTAATGTCAGATGTGTCGAGCTGCTCAAGCAGTACACCTCCGCCTGTAAGACTAT
TGAGGATGCATTAAGAAATAGTGCAAGATTGGAAAGCGCCGATGTGTCGGAAATGCTAACCT
TCGATAAGAAGGCATTCACACTGGCGAACGTAAGCTCTTTCGGCGATTACAACCTGTCTTCG
GTAATCCCTAGCTTGCCCACATCCGGCTCTCGGGTGGCGGGGCGGAGCGCTATCGAGGACAT
TTTATTCTCGAAACTGGTTACATCTGGGCTCGGAACTGTGGACGCCGATTACAAGAAGTGCA
CCAAGGGCCTAAGCATCGCCGACCTCGCCTGTGCTCAGTACTACAACGGAATTATGGTGCTG
CCAGGTGTCGCTGACGCAGAGCGGATGGCTATGTATACCGGCAGTCTCATTGGCGGGATTGC
GTTGGGCGGCCTGACGTCCGCTGTCTCCATCCCTTTCTCTCTGGCTATACAAGCCCGACTGA
ATTATGTGGCCCTGCAGACTGATGTCCTGCAAGAAAATCAGAAGATTCTTGCCGCCAGCTTC
AACAAGGCCATGACTAATATTGTGGATGCGTTTACCGGAGTGAATGACGCCATCACCCAAAC
GTCCCAAGCCCTGCAGACAGTCGCCACGGCGTTAAACAAAATCCAGGATGTAGTGAATCAGC
AAGGGAACAGCTTGAATCACCTGACGTCCCAGTTAAGACAGAACTTTCAGGCAATCAGTAGC
TCAATCCAGGCTATCTACGATCGATTAGATCCTCCTCAGGCAGATCAGCAGGTGGATCGGCT
CATCACCGGCCGCCTCGCGGCATTGAATGTTTTCGTAAGTCATACCTTGACCAAGTACACGG
AGGTGAGGGCCAGTCGCCAGCTGGCTCAGCAAAAAGTGAATGAGTGTGTGAAATCACAGAGC
AAACGGTACGGGTTTTGTGGAAATGGGACGCACATCTTTAGCATCGTTAATGCTGCCCCCGA
AGGGTTAGTCTTCCTGCACACTGTGCTCCTTCCTACCCAGTATAAAGATGTCGAAGCATGGT
CTGGGCTCTGTGTCGATGGAACTAACGGTTATGTCCTTCGACAGCCAAACCTCGCTCTCTAT
AAAGAAGGGAATTACTATAGGATCACCTCAAGAATCATGTTCGAGCCCAGGATACCAACAAT
GGCCGATTTTGTGCAGATTGAAAATTGTAACGTGACCTTTGTGAATATCAGTCGATCCGAGC
TTCAAACGATTGTTCCTGAGTACATCGACGTGAATAAAACTCTACAAGAGCTGTCCTATAAA
CTGCCTAATTATACCGTGCCTGACCTTGTAGTCGAGCAATACAACCAGACTATTCTGAACCT
GACATCGGAAATCTCTACATTGGAGAATAAAAGCGCCGAGCTCAATTACACAGTGCAGAAGC
TGCAGACCCTGATCGACAATATTAACAGCACTCTTGTGGACTTAAAGTGGCTGAACCGTGTG
GAGACTTACATCAAGTGGCCCTGGTGGGTGTGGCTCTGTATTTCCGTGGTCCTTATATTTGT
TGTAAGTATGCTGCTCCTGtctttatggatgtgctccaatggatcgttacaatgcagaattt
gcattTGA
PDI-229E -H5iCT(V4)-DNA
(SEQ ID NO: 151)
atggcgaaaaacgttgcgattttcggcttattgttttctcttcttgtgttggttccttctca
gatcttcgcgCAAACGACTAATGGGCTGAACACCAGTTACAGCGTCTGTAACGGCTGCGTCG
GATATAGCGAGAACGTGTTCGCAGTGGAAAGTGGGGGGTACATTCCTTCCGACTTCGCTTTC
AATAACTGGTTTCTCCTGACTAACACAAGCTCCGTCGTGGATGGCGTGGTCAGGTCCTTTCA
GCCTCTTCTCCTGAATTGCCTGTGGTCTGTGTCCGGGTTAAGATTCACTACAGGCTTCGTAT
ACTTCAACGGGACGGGCCGGGGGGATTGCAAGGGCTTCTCCTCCGACGTGCTGTCAGATGTG
ATCCGTTACAATCTGAACTTCGAAGAGAACTTACGGCGGGGGACAATCCTGTTCAAAACATC
ATATGGCGTAGTCGTATTTTACTGCACCAATAATACCCTGGTGAGTGGGGACGCCCATATTC
CCTTCGGAACAGTGCTGGGTAACTTTTACTGTTTTGTCAACACTACGATCGGAAACGAAACC
ACTAGCGCCTTTGTCGGAGCTCTGCCAAAAACAGTTAGGGAGTTCGTGATCTCTCGGACCGG
TCACTTCTATATCAACGGCTACCGTTATTTTACTTTGGGCAACGTCGAAGCCGTCAATTTTA
ATGTGACAACTGCAGAGACAACTGACTTTTGCACTGTGGCTCTCGCCAGTTATGCCGATGTG
CTGGTGAATGTAAGTCAAACGTCAATTGCCAACATCATCTATTGTAACTCAGTAATCAACCG
GCTCCGCTGTGACCAACTCTCATTCGACGTCCCCGACGGATTCTATTCCACGAGCCCGATTC
AGAGCGTGGAACTGCCAGTTTCCATCGTATCCCTCCCAGTTTACCACAAGCACACTTTTATC
GTTCTCTACGTAGATTTTAAACCCCAGTCAGGAGGAGGGAAATGCTTCAACTGCTACCCGGC
TGGCGTGAACATCACCTTGGCCAATTTTAATGAAACTAAAGGGCCCCTTTGCGTGGATACGT
CACACTTTACCACAAAGTATGTTGCAGTCTATGCTAACGTCGGCAGGTGGTCAGCGTCCATT
AACACAGGCAATTGCCCGTTCTCTTTCGGGAAAGTGAACAACTTCGTGAAGTTTGGAAGTGT
GTGCTTCAGTTTGAAAGACATTCCGGGCGGCTGCGCCATGCCTATTGTGGCTAATTGGGCTT
ATTCCAAGTACTACACCATTGGCTCTCTCTACGTTAGCTGGAGCGACGGTGACGGTATAACG
GGCGTACCACAACCGGTGGAAGGGGTCAGCTCTTTCATGAATGTCACTCTGGACAAGTGTAC
CAAATATAATATATACGATGTGAGTGGAGTGGGCGTTATACGCGTGTCTAACGACACCTTTC
TAAACGGCATAACCTACACAAGCACGTCAGGCAATCTGTTAGGTTTTAAAGACGTCACTAAA
GGCACTATATATAGCATCACCCCATGCAACCCACCTGATCAATTAGTCGTATATCAGCAAGC
TGTTGTGGGTGCTATGCTGTCAGAAAACTTCACCAGCTACGGGTTCTCCAATGTGGTGGAAC
TGCCCAAATTCTTTTACGCTAGCAATGGCACATATAACTGTACTGACGCCGTCTTGACTTAC
AGTTCATTCGGAGTGTGCGCGGACGGCAGCATTATCGCCGTGCAGCCGGCCAATGTCAGCTA
TGATTCCGTTTCCGCCATCGTGACAGCCAACTTGTCGATTCCCTCTAACTGGACAACGTCTG
TCCAAGTCGAATATCTGCAGATCACCTCAACCCCCATAGTAGTCGATTGCTCAACCTACGTC
TGCAACGGTAATGTCAGATGTGTCGAGCTGCTCAAGCAGTACACCTCCGCCTGTAAGACTAT
TGAGGATGCATTAAGAAATAGTGCAAGATTGGAAAGCGCCGATGTGTCGGAAATGCTAACCT
TCGATAAGAAGGCATTCACACTGGCGAACGTAAGCTCTTTCGGCGATTACAACCTGTCTTCG
GTAATCCCTAGCTTGCCCACATCCGGCTCTCGGGTGGCGGGGCGGAGCGCTATCGAGGACAT
TTTATTCTCGAAACTGGTTACATCTGGGCTCGGAACTGTGGACGCCGATTACAAGAAGTGCA
CCAAGGGCCTAAGCATCGCCGACCTCGCCTGTGCTCAGTACTACAACGGAATTATGGTGCTG
CCAGGTGTCGCTGACGCAGAGCGGATGGCTATGTATACCGGCAGTCTCATTGGCGGGATTGC
GTTGGGCGGCCTGACGTCCGCTGTCTCCATCCCTTTCTCTCTGGCTATACAAGCCCGACTGA
ATTATGTGGCCCTGCAGACTGATGTCCTGCAAGAAAATCAGAAGATTCTTGCCGCCAGCTTC
AACAAGGCCATGACTAATATTGTGGATGCGTTTACCGGAGTGAATGACGCCATCACCCAAAC
GTCCCAAGCCCTGCAGACAGTCGCCACGGCGTTAAACAAAATCCAGGATGTAGTGAATCAGC
AAGGGAACAGCTTGAATCACCTGACGTCCCAGTTAAGACAGAACTTTCAGGCAATCAGTAGC
TCAATCCAGGCTATCTACGATCGATTAGATCCTCCTCAGGCAGATCAGCAGGTGGATCGGCT
CATCACCGGCCGCCTCGCGGCATTGAATGTTTTCGTAAGTCATACCTTGACCAAGTACACGG
AGGTGAGGGCCAGTCGCCAGCTGGCTCAGCAAAAAGTGAATGAGTGTGTGAAATCACAGAGC
AAACGGTACGGGTTTTGTGGAAATGGGACGCACATCTTTAGCATCGTTAATGCTGCCCCCGA
AGGGTTAGTCTTCCTGCACACTGTGCTCCTTCCTACCCAGTATAAAGATGTCGAAGCATGGT
CTGGGCTCTGTGTCGATGGAACTAACGGTTATGTCCTTCGACAGCCAAACCTCGCTCTCTAT
AAAGAAGGGAATTACTATAGGATCACCTCAAGAATCATGTTCGAGCCCAGGATACCAACAAT
GGCCGATTTTGTGCAGATTGAAAATTGTAACGTGACCTTTGTGAATATCAGTCGATCCGAGC
TTCAAACGATTGTTCCTGAGTACATCGACGTGAATAAAACTCTACAAGAGCTGTCCTATAAA
CTGCCTAATTATACCGTGCCTGACCTTGTAGTCGAGCAATACAACCAGACTATTCTGAACCT
GACATCGGAAATCTCTACATTGGAGAATAAAAGCGCCGAGCTCAATTACACAGTGCAGAAGC
TGCAGACCCTGATCGACAATATTAACAGCACTCTTGTGGACTTAAAGTGGCTGAACCGTGTG
GAGACTTACATCAAGTGGCCCTGGTGGGTGTGGCTCTGTATTTCCGTGGTCCTTATATTTGT
TGTAAGTATGCTGCTCCTGtgctgctccaatggatcgttacaatgcagaatttgcattTGA
PDI-229E -H1cCT-DNA
(SEQ ID NO: 152)
atggcgaaaaacgttgcgattttcggcttattgttttctcttcttgtgttggttccttctca
gatcttcgcgCAAACGACTAATGGGCTGAACACCAGTTACAGCGTCTGTAACGGCTGCGTCG
GATATAGCGAGAACGTGTTCGCAGTGGAAAGTGGGGGGTACATTCCTTCCGACTTCGCTTTC
AATAACTGGTTTCTCCTGACTAACACAAGCTCCGTCGTGGATGGCGTGGTCAGGTCCTTTCA
GCCTCTTCTCCTGAATTGCCTGTGGTCTGTGTCCGGGTTAAGATTCACTACAGGCTTCGTAT
ACTTCAACGGGACGGGCCGGGGGGATTGCAAGGGCTTCTCCTCCGACGTGCTGTCAGATGTG
ATCCGTTACAATCTGAACTTCGAAGAGAACTTACGGCGGGGGACAATCCTGTTCAAAACATC
ATATGGCGTAGTCGTATTTTACTGCACCAATAATACCCTGGTGAGTGGGGACGCCCATATTC
CCTTCGGAACAGTGCTGGGTAACTTTTACTGTTTTGTCAACACTACGATCGGAAACGAAACC
ACTAGCGCCTTTGTCGGAGCTCTGCCAAAAACAGTTAGGGAGTTCGTGATCTCTCGGACCGG
TCACTTCTATATCAACGGCTACCGTTATTTTACTTTGGGCAACGTCGAAGCCGTCAATTTTA
ATGTGACAACTGCAGAGACAACTGACTTTTGCACTGTGGCTCTCGCCAGTTATGCCGATGTG
CTGGTGAATGTAAGTCAAACGTCAATTGCCAACATCATCTATTGTAACTCAGTAATCAACCG
GCTCCGCTGTGACCAACTCTCATTCGACGTCCCCGACGGATTCTATTCCACGAGCCCGATTC
AGAGCGTGGAACTGCCAGTTTCCATCGTATCCCTCCCAGTTTACCACAAGCACACTTTTATC
GTTCTCTACGTAGATTTTAAACCCCAGTCAGGAGGAGGGAAATGCTTCAACTGCTACCCGGC
TGGCGTGAACATCACCTTGGCCAATTTTAATGAAACTAAAGGGCCCCTTTGCGTGGATACGT
CACACTTTACCACAAAGTATGTTGCAGTCTATGCTAACGTCGGCAGGTGGTCAGCGTCCATT
AACACAGGCAATTGCCCGTTCTCTTTCGGGAAAGTGAACAACTTCGTGAAGTTTGGAAGTGT
GTGCTTCAGTTTGAAAGACATTCCGGGCGGCTGCGCCATGCCTATTGTGGCTAATTGGGCTT
ATTCCAAGTACTACACCATTGGCTCTCTCTACGTTAGCTGGAGCGACGGTGACGGTATAACG
GGCGTACCACAACCGGTGGAAGGGGTCAGCTCTTTCATGAATGTCACTCTGGACAAGTGTAC
CAAATATAATATATACGATGTGAGTGGAGTGGGCGTTATACGCGTGTCTAACGACACCTTTC
TAAACGGCATAACCTACACAAGCACGTCAGGCAATCTGTTAGGTTTTAAAGACGTCACTAAA
GGCACTATATATAGCATCACCCCATGCAACCCACCTGATCAATTAGTCGTATATCAGCAAGC
TGTTGTGGGTGCTATGCTGTCAGAAAACTTCACCAGCTACGGGTTCTCCAATGTGGTGGAAC
TGCCCAAATTCTTTTACGCTAGCAATGGCACATATAACTGTACTGACGCCGTCTTGACTTAC
AGTTCATTCGGAGTGTGCGCGGACGGCAGCATTATCGCCGTGCAGCCGGCCAATGTCAGCTA
TGATTCCGTTTCCGCCATCGTGACAGCCAACTTGTCGATTCCCTCTAACTGGACAACGTCTG
TCCAAGTCGAATATCTGCAGATCACCTCAACCCCCATAGTAGTCGATTGCTCAACCTACGTC
TGCAACGGTAATGTCAGATGTGTCGAGCTGCTCAAGCAGTACACCTCCGCCTGTAAGACTAT
TGAGGATGCATTAAGAAATAGTGCAAGATTGGAAAGCGCCGATGTGTCGGAAATGCTAACCT
TCGATAAGAAGGCATTCACACTGGCGAACGTAAGCTCTTTCGGCGATTACAACCTGTCTTCG
GTAATCCCTAGCTTGCCCACATCCGGCTCTCGGGTGGCGGGGCGGAGCGCTATCGAGGACAT
TTTATTCTCGAAACTGGTTACATCTGGGCTCGGAACTGTGGACGCCGATTACAAGAAGTGCA
CCAAGGGCCTAAGCATCGCCGACCTCGCCTGTGCTCAGTACTACAACGGAATTATGGTGCTG
CCAGGTGTCGCTGACGCAGAGCGGATGGCTATGTATACCGGCAGTCTCATTGGCGGGATTGC
GTTGGGCGGCCTGACGTCCGCTGTCTCCATCCCTTTCTCTCTGGCTATACAAGCCCGACTGA
ATTATGTGGCCCTGCAGACTGATGTCCTGCAAGAAAATCAGAAGATTCTTGCCGCCAGCTTC
AACAAGGCCATGACTAATATTGTGGATGCGTTTACCGGAGTGAATGACGCCATCACCCAAAC
GTCCCAAGCCCTGCAGACAGTCGCCACGGCGTTAAACAAAATCCAGGATGTAGTGAATCAGC
AAGGGAACAGCTTGAATCACCTGACGTCCCAGTTAAGACAGAACTTTCAGGCAATCAGTAGC
TCAATCCAGGCTATCTACGATCGATTAGATCCTCCTCAGGCAGATCAGCAGGTGGATCGGCT
CATCACCGGCCGCCTCGCGGCATTGAATGTTTTCGTAAGTCATACCTTGACCAAGTACACGG
AGGTGAGGGCCAGTCGCCAGCTGGCTCAGCAAAAAGTGAATGAGTGTGTGAAATCACAGAGC
AAACGGTACGGGTTTTGTGGAAATGGGACGCACATCTTTAGCATCGTTAATGCTGCCCCCGA
AGGGTTAGTCTTCCTGCACACTGTGCTCCTTCCTACCCAGTATAAAGATGTCGAAGCATGGT
CTGGGCTCTGTGTCGATGGAACTAACGGTTATGTCCTTCGACAGCCAAACCTCGCTCTCTAT
AAAGAAGGGAATTACTATAGGATCACCTCAAGAATCATGTTCGAGCCCAGGATACCAACAAT
GGCCGATTTTGTGCAGATTGAAAATTGTAACGTGACCTTTGTGAATATCAGTCGATCCGAGC
TTCAAACGATTGTTCCTGAGTACATCGACGTGAATAAAACTCTACAAGAGCTGTCCTATAAA
CTGCCTAATTATACCGTGCCTGACCTTGTAGTCGAGCAATACAACCAGACTATTCTGAACCT
GACATCGGAAATCTCTACATTGGAGAATAAAAGCGCCGAGCTCAATTACACAGTGCAGAAGC
TGCAGACCCTGATCGACAATATTAACAGCACTCTTGTGGACTTAAAGTGGCTGAACCGTGTG
GAGACTTACATCAAGTGGCCCTGGTGGGTGTGGCTCTGTATTTCCGTGGTCCTTATATTTGT
TGTAAGTATGCTGCTCCTGagcttctggatgtgctctaatgggtctctacagtgtagaatat
gtattTGA
PDI-229E -wtTMCT-AA
(SEQ ID NO: 153)
MAKNVAIFGLLFSLLVLVPSQIFAQTTNGLNTSYSVCNGCVGYSENVFAVESGGYIPSDFAF
NNWFLLTNTSSVVDGVVRSFQPLLLNCLWSVSGLRFTTGFVYFNGTGRGDCKGFSSDVLSDV
IRYNLNFEENLRRGTILFKTSYGVVVFYCTNNTLVSGDAHIPFGTVLGNFYCFVNTTIGNET
TSAFVGALPKTVREFVISRTGHFYINGYRYFTLGNVEAVNFNVTTAETTDFCTVALASYADV
LVNVSQTSIANIIYCNSVINRLRCDQLSFDVPDGFYSTSPIQSVELPVSIVSLPVYHKHTFI
VLYVDFKPQSGGGKCFNCYPAGVNITLANFNETKGPLCVDTSHFTTKYVAVYANVGRWSASI
NTGNCPFSFGKVNNFVKFGSVCFSLKDIPGGCAMPIVANWAYSKYYTIGSLYVSWSDGDGIT
GVPQPVEGVSSFMNVTLDKCTKYNIYDVSGVGVIRVSNDTFLNGITYTSTSGNLLGFKDVTK
GTIYSITPCNPPDQLVVYQQAVVGAMLSENFTSYGFSNVVELPKFFYASNGTYNCTDAVLTY
SSFGVCADGSIIAVQPANVSYDSVSAIVTANLSIPSNWTTSVQVEYLQITSTPIVVDCSTYV
CNGNVRCVELLKQYTSACKTIEDALRNSARLESADVSEMLTFDKKAFTLANVSSFGDYNLSS
VIPSLPTSGSRVAGRSAIEDILFSKLVTSGLGTVDADYKKCTKGLSIADLACAQYYNGIMVL
PGVADAERMAMYTGSLIGGIALGGLTSAVSIPFSLAIQARLNYVALQTDVLQENQKILAASF
NKAMTNIVDAFTGVNDAITQTSQALQTVATALNKIQDVVNQQGNSLNHLTSQLRONFQAISS
SIQAIYDRLDPPQADQQVDRLITGRLAALNVFVSHTLTKYTEVRASRQLAQQKVNECVKSQS
KRYGFCGNGTHIFSIVNAAPEGLVFLHTVLLPTQYKDVEAWSGLCVDGTNGYVLROPNLALY
KEGNYYRITSRIMFEPRIPTMADFVQIENCNVTFVNISRSELQTIVPEYIDVNKTLQELSYK
LPNYTVPDLVVEQYNQTILNLTSEISTLENKSAELNYTVQKLQTLIDNINSTLVDLKWLNRV
ETYIKWPWWVWLCISVVLIFVVSMLLLCCCSTGCCGFFSCFASSIRGCCESTKLPYYDVEKI
HIQ
PDI-229E -H5iTMCT-AA
(SEQ ID NO: 154)
MAKNVAIFGLLFSLLVLVPSQIFAQTTNGLNTSYSVCNGCVGYSENVFAVESGGYIPSDFAF
NNWFLLTNTSSVVDGVVRSFQPLLLNCLWSVSGLRFTTGFVYFNGTGRGDCKGFSSDVLSDV
IRYNLNFEENLRRGTILFKTSYGVVVFYCTNNTLVSGDAHIPFGTVLGNFYCFVNTTIGNET
TSAFVGALPKTVREFVISRTGHFYINGYRYFTLGNVEAVNFNVTTAETTDFCTVALASYADV
LVNVSQTSIANIIYCNSVINRLRCDQLSFDVPDGFYSTSPIQSVELPVSIVSLPVYHKHTFI
VLYVDFKPQSGGGKCFNCYPAGVNITLANFNETKGPLCVDTSHFTTKYVAVYANVGRWSASI
NTGNCPFSFGKVNNFVKFGSVCFSLKDIPGGCAMPIVANWAYSKYYTIGSLYVSWSDGDGIT
GVPQPVEGVSSFMNVTLDKCTKYNIYDVSGVGVIRVSNDTFLNGITYTSTSGNLLGFKDVTK
GTIYSITPCNPPDQLVVYQQAVVGAMLSENFTSYGFSNVVELPKFFYASNGTYNCTDAVLTY
SSFGVCADGSIIAVQPANVSYDSVSAIVTANLSIPSNWTTSVQVEYLQITSTPIVVDCSTYV
CNGNVRCVELLKQYTSACKTIEDALRNSARLESADVSEMLTFDKKAFTLANVSSFGDYNLSS
VIPSLPTSGSRVAGRSAIEDILFSKLVTSGLGTVDADYKKCTKGLSIADLACAQYYNGIMVL
PGVADAERMAMYTGSLIGGIALGGLTSAVSIPFSLAIQARLNYVALQTDVLQENQKILAASF
NKAMTNIVDAFTGVNDAITQTSQALQTVATALNKIQDVVNQQGNSLNHLTSQLRQNFQAISS
SIQAIYDRLDPPQADQQVDRLITGRLAALNVFVSHTLTKYTEVRASRQLAQQKVNECVKSQS
KRYGFCGNGTHIFSIVNAAPEGLVFLHTVLLPTQYKDVEAWSGLCVDGTNGYVLRQPNLALY
KEGNYYRITSRIMFEPRIPTMADFVQIENCNVTFVNISRSELQTIVPEYIDVNKTLQELSYK
LPNYTVPDLVVEQYNQTILNLTSEISTLENKSAELNYTVQKLQTLIDNINSTLVDLKWLNRV
ETYIKWPWWQILSIYSTVASSLALAIMMAGLSLWMCSNGSLQCRICI
PDI-229E -H5iCT-AA
(SEQ ID NO: 155)
MAKNVAIFGLLFSLLVLVPSQIFAQTTNGLNTSYSVCNGCVGYSENVFAVESGGYIPSDFAF
NNWFLLTNTSSVVDGVVRSFQPLLLNCLWSVSGLRFTTGFVYFNGTGRGDCKGFSSDVLSDV
IRYNLNFEENLRRGTILFKTSYGVVVFYCTNNTLVSGDAHIPFGTVLGNFYCFVNTTIGNET
TSAFVGALPKTVREFVISRTGHFYINGYRYFTLGNVEAVNFNVTTAETTDFCTVALASYADV
LVNVSQTSIANIIYCNSVINRLRCDQLSFDVPDGFYSTSPIQSVELPVSIVSLPVYHKHTFI
VLYVDFKPQSGGGKCFNCYPAGVNITLANFNETKGPLCVDTSHFTTKYVAVYANVGRWSASI
NTGNCPFSFGKVNNFVKFGSVCFSLKDIPGGCAMPIVANWAYSKYYTIGSLYVSWSDGDGIT
GVPQPVEGVSSFMNVTLDKCTKYNIYDVSGVGVIRVSNDTFLNGITYTSTSGNLLGFKDVTK
GTIYSITPCNPPDQLVVYQQAVVGAMLSENFTSYGFSNVVELPKFFYASNGTYNCTDAVLTY
SSFGVCADGSIIAVQPANVSYDSVSAIVTANLSIPSNWTTSVQVEYLQITSTPIVVDCSTYV
CNGNVRCVELLKQYTSACKTIEDALRNSARLESADVSEMLTFDKKAFTLANVSSFGDYNLSS
VIPSLPTSGSRVAGRSAIEDILFSKLVTSGLGTVDADYKKCTKGLSIADLACAQYYNGIMVL
PGVADAERMAMYTGSLIGGIALGGLTSAVSIPFSLAIQARLNYVALQTDVLQENQKILAASF
NKAMTNIVDAFTGVNDAITQTSQALQTVATALNKIQDVVNQQGNSLNHLTSQLRQNFQAISS
SIQAIYDRLDPPQADQQVDRLITGRLAALNVFVSHTLTKYTEVRASRQLAQQKVNECVKSQS
KRYGFCGNGTHIFSIVNAAPEGLVFLHTVLLPTQYKDVEAWSGLCVDGTNGYVLRQPNLALY
KEGNYYRITSRIMFEPRIPTMADFVQIENCNVTFVNISRSELQTIVPEYIDVNKTLQELSYK
LPNYTVPDLVVEQYNQTILNLTSEISTLENKSAELNYTVQKLQTLIDNINSTLVDLKWLNRV
ETYIKWPWWVWLCISVVLIFVVSMLLLSLWMCSNGSLQCRICI
PDI-229E -H5iCT(V4)-AA
(SEQ ID NO: 156)
MAKNVAIFGLLFSLLVLVPSQIFAQTTNGLNTSYSVCNGCVGYSENVFAVESGGYIPSDFAF
NNWFLLTNTSSVVDGVVRSFQPLLLNCLWSVSGLRFTTGFVYFNGTGRGDCKGFSSDVLSDV
IRYNLNFEENLRRGTILFKTSYGVVVFYCTNNTLVSGDAHIPFGTVLGNFYCFVNTTIGNET
TSAFVGALPKTVREFVISRTGHFYINGYRYFTLGNVEAVNFNVTTAETTDFCTVALASYADV
LVNVSQTSIANIIYCNSVINRLRCDQLSFDVPDGFYSTSPIQSVELPVSIVSLPVYHKHTFI
VLYVDFKPQSGGGKCFNCYPAGVNITLANFNETKGPLCVDTSHFTTKYVAVYANVGRWSASI
NTGNCPFSFGKVNNFVKFGSVCFSLKDIPGGCAMPIVANWAYSKYYTIGSLYVSWSDGDGIT
GVPQPVEGVSSFMNVTLDKCTKYNIYDVSGVGVIRVSNDTFLNGITYTSTSGNLLGFKDVTK
GTIYSITPCNPPDQLVVYQQAVVGAMLSENFTSYGFSNVVELPKFFYASNGTYNCTDAVLTY
SSFGVCADGSIIAVQPANVSYDSVSAIVTANLSIPSNWTTSVQVEYLQITSTPIVVDCSTYV
CNGNVRCVELLKQYTSACKTIEDALRNSARLESADVSEMLTFDKKAFTLANVSSFGDYNLSS
VIPSLPTSGSRVAGRSAIEDILFSKLVTSGLGTVDADYKKCTKGLSIADLACAQYYNGIMVL
PGVADAERMAMYTGSLIGGIALGGLTSAVSIPFSLAIQARLNYVALQTDVLQENQKILAASF
NKAMTNIVDAFTGVNDAITQTSQALQTVATALNKIQDVVNQQGNSLNHLTSQLRQNFQAISS
SIQAIYDRLDPPQADQQVDRLITGRLAALNVFVSHTLTKYTEVRASROLAQQKVNECVKSQS
KRYGFCGNGTHIFSIVNAAPEGLVFLHTVLLPTQYKDVEAWSGLCVDGTNGYVLRQPNLALY
KEGNYYRITSRIMFEPRIPTMADFVQIENCNVTFVNISRSELQTIVPEYIDVNKTLQELSYK
LPNYTVPDLVVEQYNQTILNLTSEISTLENKSAELNYTVQKLQTLIDNINSTLVDLKWLNRV
ETYIKWPWWVWLCISVVLIFVVSMLLLCCSNGSLQCRICI
PDI-229E-H1cCT-AA
(SEQ ID NO: 157)
MAKNVAIFGLLFSLLVLVPSQIFAQTTNGLNTSYSVCNGCVGYSENVFAVESGGYIPSDFAF
NNWFLLTNTSSVVDGVVRSFQPLLLNCLWSVSGLRFTTGFVYFNGTGRGDCKGFSSDVLSDV
IRYNLNFEENLRRGTILFKTSYGVVVFYCTNNTLVSGDAHIPFGTVLGNFYCFVNTTIGNET
TSAFVGALPKTVREFVISRTGHFYINGYRYFTLGNVEAVNFNVTTAETTDFCTVALASYADV
LVNVSQTSIANIIYCNSVINRLRCDQLSFDVPDGFYSTSPIQSVELPVSIVSLPVYHKHTFI
VLYVDFKPQSGGGKCFNCYPAGVNITLANFNETKGPLCVDTSHFTTKYVAVYANVGRWSASI
NTGNCPFSFGKVNNFVKFGSVCFSLKDIPGGCAMPIVANWAYSKYYTIGSLYVSWSDGDGIT
GVPQPVEGVSSFMNVTLDKCTKYNIYDVSGVGVIRVSNDTFLNGITYTSTSGNLLGFKDVTK
GTIYSITPCNPPDQLVVYQQAVVGAMLSENFTSYGFSNVVELPKFFYASNGTYNCTDAVLTY
SSFGVCADGSIIAVQPANVSYDSVSAIVTANLSIPSNWTTSVQVEYLQITSTPIVVDCSTYV
CNGNVRCVELLKQYTSACKTIEDALRNSARLESADVSEMLTFDKKAFTLANVSSFGDYNLSS
VIPSLPTSGSRVAGRSAIEDILFSKLVTSGLGTVDADYKKCTKGLSIADLACAQYYNGIMVL
PGVADAERMAMYTGSLIGGIALGGLTSAVSIPFSLAIQARLNYVALQTDVLQENQKILAASF
NKAMTNIVDAFTGVNDAITQTSQALQTVATALNKIQDVVNQQGNSLNHLTSQLRQNFQAISS
SIQAIYDRLDPPQADQQVDRLITGRLAALNVFVSHTLTKYTEVRASROLAQQKVNECVKSQS
KRYGFCGNGTHIFSIVNAAPEGLVFLHTVLLPTQYKDVEAWSGLCVDGTNGYVLROPNLALY
KEGNYYRITSRIMFEPRIPTMADFVQIENCNVTFVNISRSELQTIVPEYIDVNKTLQELSYK
LPNYTVPDLVVEQYNQTILNLTSEISTLENKSAELNYTVQKLQTLIDNINSTLVDLKWLNRV
ETYIKWPWWVWLCISVVLIFVVSMLLLSFWMCSNGSLQCRICI
Native OC43-CoV S protein wtTM/CT AA (AVR40344)
(SEQ ID NO: 158)
MFLILLISLPTAFAVIGDLNCTLDPRLKGSFNNRDTGPPSISIDTVDVINGLGTYYVLDRVY
LNTTLFLNGYYPTSGSTYRNMALKGTDLLSTLWFKPPFLSDFINGIFAKVKNTKVFKDGVMY
SEFPAITIGSTFVNTSYSVVVQPRTINSTQDGVNKLQGLLEVSVCQYNMCEYPHTICHPNLG
NHFKELWHYDTGVVSCLYKRNFTYDVNATYLYFHFYQEGGTFYAYFTDTGFVTKFLFNVYLG
MALSHYYVMPLTCIRRPKDGFSLEYWVTPLTPRQYLLAFNQDGIIFNAVDCMSDFMSEIKCK
TQSIAPPTGVYELNGYTVQPVADVYRRKPDLPNCNIEAWLNDKSVPSPLNWERKTFSNCNFN
MSSLMSFIQADSFTCNNIDAAKIYGMCFSSITIDKFAIPNRRKVDLQLGNLGYLQSSNYRID
TTATSCQLYYNLPAANVSVSRFNPSTWNKRFGFIEDSVFVPQPTGVFTNHSVVYAQHCFKAP
KNFCPCSSCSCPGKNNGIGTCPAGTNSLTCDNLCTLDPITLKAPDTYKCPQSKSLVGIGEHC
SGLAVKSDYCGNNSCTCQPQAFLGWSADSCLQGDKCNIFANFILHDVNNGLTCSTDLQKANT
EIELGVCVNYDLYGISGQGIFVEVNATYYNSWQNLLYDSNGNLYGFRDYITNRTFMIHSCYS
GRVSAAYHANSSEPALLFRNIKCNYVFNNSLTRQLQPINYSFDSYLGCVVNAYNSTAISVQT
CDLTVGSGYCVDYSKNRRSRRAITTGYRFTNFEPFTVNSVNDSLEPVGGLYEIQIPSEFTIG
NMEEFIQTSSPKVTIDCAAFVCGDYAACKLQLVEYGSFCDNINAILTEVNELLDTTQLQVAN
SLMNGVTLSTKLKDGVNFNVDDINFSPVLGCLGSECSKASSRSAIEDLLFDKVKLSDVGFVE
AYNNCTGGAEIRDLICVQSYKGIKVLPPLLSENQISGYTLAATSASLFPPWTAAAGVPFYLN
VQYRLNGLGVTMDVLSQNQKLIANAFNNALHAIQQGFDATNSALVKIQAVVNANAEALNNLL
QQLSNRFGAISASLQEILSRLDALEAEAQIDRLINGRLTALNAYVSQQLSDSTLVKFSAAQA
MEKVNECVKSQSSRINFCGNGNHIISLVQNAPYGLYFIHFNYVPTKYVTAKVSPGLCIAGNR
GIAPKSGYFVNVNNTWMYTGSGYYYPEPITENNVVVMSTCAVNYTKAPYVMLNTSIPNLPDF
KEELDQWFKNQTSVAPDLSLDYINVTFLDLQVEMNRLQEAIKVLNHSYINLKDIGTYEYYVK
WPWYVWLLICLAGVAMLVLLFFICCCTGCGTSCFKKCGGCCDDYTGYQELVIKTSHDD
Native 229E S protein wtTM/CT AA (P15423)
(SEQ ID NO: 159)
MFVLLVAYALLHIAGCQTTNGLNTSYSVCNGCVGYSENVFAVESGGYIPSDFAFNNWFLLTN
TSSVVDGVVRSFQPLLLNCLWSVSGLRFTTGFVYFNGTGRGDCKGFSSDVLSDVIRYNLNFE
ENLRRGTILFKTSYGVVVFYCTNNTLVSGDAHIPFGTVLGNFYCFVNTTIGNETTSAFVGAL
PKTVREFVISRTGHFYINGYRYFTLGNVEAVNFNVTTAETTDFCTVALASYADVLVNVSQTS
IANIIYCNSVINRLRCDQLSFDVPDGFYSTSPIQSVELPVSIVSLPVYHKHTFIVLYVDFKP
QSGGGKCFNCYPAGVNITLANFNETKGPLCVDTSHFTTKYVAVYANVGRWSASINTGNCPFS
FGKVNNFVKFGSVCFSLKDIPGGCAMPIVANWAYSKYYTIGSLYVSWSDGDGITGVPQPVEG
VSSFMNVTLDKCTKYNIYDVSGVGVIRVSNDTFLNGITYTSTSGNLLGFKDVTKGTIYSITP
CNPPDQLVVYQQAVVGAMLSENFTSYGFSNVVELPKFFYASNGTYNCTDAVLTYSSFGVCAD
GSIIAVQPRNVSYDSVSAIVTANLSIPSNWTTSVQVEYLQITSTPIVVDCSTYVCNGNVRCV
ELLKQYTSACKTIEDALRNSARLESADVSEMLTFDKKAFTLANVSSFGDYNLSSVIPSLPTS
GSRVAGRSAIEDILFSKLVTSGLGTVDADYKKCTKGLSIADLACAQYYNGIMVLPGVADAER
MAMYTGSLIGGIALGGLTSAVSIPFSLAIQARLNYVALQTDVLQENQKILAASFNKAMTNIV
DAFTGVNDAITQTSQALQTVATALNKIQDVVNQQGNSLNHLTSQLRQNFQAISSSIQAIYDR
LDTIQADQQVDRLITGRLAALNVFVSHTLTKYTEVRASRQLAQQKVNECVKSQSKRYGFCGN
GTHIFSIVNAAPEGLVFLHTVLLPTQYKDVEAWSGLCVDGTNGYVLRQPNLALYKEGNYYRI
TSRIMFEPRIPTMADFVQIENCNVTFVNISRSELQTIVPEYIDVNKTLQELSYKLPNYTVPD
LVVEQYNQTILNLTSEISTLENKSAELNYTVQKLQTLIDNINSTLVDLKWLNRVETYIKWPW
WVWLCISVVLIFVVSMLLLCCCSTGCCGFFSCFASSIRGCCESTKLPYYDVEKIHIQ
Native OC43-CoV S protein wtTM/CT AA (AVR40344) without signal peptide
(SEQ ID NO: 160)
VIGDLNCTLDPRLKGSFNNRDTGPPSISIDTVDVTNGLGTYYVLDRVYLNTTLFLNGYYPTS
GSTYRNMALKGTDLLSTLWFKPPFLSDFINGIFAKVKNTKVFKDGVMYSEFPAITIGSTFVN
TSYSVVVQPRTINSTQDGVNKLQGLLEVSVCQYNMCEYPHTICHPNLGNHFKELWHYDTGVV
SCLYKRNFTYDVNATYLYFHFYQEGGTFYAYFTDTGFVTKFLFNVYLGMALSHYYVMPLTCI
RRPKDGFSLEYWVTPLTPRQYLLAFNQDGIIFNAVDCMSDFMSEIKCKTQSIAPPTGVYELN
GYTVQPVADVYRRKPDLPNCNIEAWLNDKSVPSPLNWERKTFSNCNFNMSSLMSFIQADSFT
CNNIDAAKIYGMCFSSITIDKFAIPNRRKVDLQLGNLGYLQSSNYRIDTTATSCQLYYNLPA
ANVSVSRFNPSTWNKRFGFIEDSVFVPQPTGVFTNHSVVYAQHCFKAPKNFCPCSSCSCPGK
NNGIGTCPAGTNSLTCDNLCTLDPITLKAPDTYKCPQSKSLVGIGEHCSGLAVKSDYCGNNS
CTCQPQAFLGWSADSCLQGDKCNIFANFILHDVNNGLTCSTDLQKANTEIELGVCVNYDLYG
ISGQGIFVEVNATYYNSWQNLLYDSNGNLYGFRDYITNRTFMIHSCYSGRVSAAYHANSSEP
ALLFRNIKCNYVFNNSLTRQLQPINYSFDSYLGCVVNAYNSTAISVQTCDLTVGSGYCVDYS
KNRRSRRAITTGYRFTNFEPFTVNSVNDSLEPVGGLYEIQIPSEFTIGNMEEFIQTSSPKVT
IDCAAFVCGDYAACKLQLVEYGSFCDNINAILTEVNELLDTTQLQVANSLMNGVTLSTKLKD
GVNFNVDDINFSPVLGCLGSECSKASSRSAIEDLLFDKVKLSDVGFVEAYNNCTGGAEIRDL
ICVQSYKGIKVLPPLLSENQISGYTLAATSASLFPPWTAAAGVPFYLNVQYRLNGLGVTMDV
LSQNQKLIANAFNNALHAIQQGFDATNSALVKIQAVVNANAEALNNLLQQLSNRFGAISASL
QEILSRLDALEAEAQIDRLINGRLTALNAYVSQQLSDSTLVKFSAAQAMEKVNECVKSQSSR
INFCGNGNHIISLVQNAPYGLYFIHFNYVPTKYVTAKVSPGLCIAGNRGIAPKSGYFVNVNN
TWMYTGSGYYYPEPITENNVVVMSTCAVNYTKAPYVMLNTSIPNLPDFKEELDQWFKNQTSV
APDLSLDYINVTFLDLQVEMNRLQEAIKVLNHSYINLKDIGTYEYYVKWPWYVWLLICLAGV
AMLVLLFFICCCTGCGTSCFKKCGGCCDDYTGYQELVIKTSHDD
Native 229E S protein wtTM/CT AA (P15423) without signal peptide
(SEQ ID NO: 161)
QTTNGLNTSYSVCNGCVGYSENVFAVESGGYIPSDFAFNNWFLLTNTSSVVDGVVRSFQPLL
LNCLWSVSGLRFTTGFVYFNGTGRGDCKGFSSDVLSDVIRYNLNFEENLRRGTILFKTSYGV
VVFYCTNNTLVSGDAHIPFGTVLGNFYCFVNTTIGNETTSAFVGALPKTVREFVISRTGHFY
INGYRYFTLGNVEAVNFNVTTAETTDFCTVALASYADVLVNVSQTSIANIIYCNSVINRLRC
DQLSFDVPDGFYSTSPIQSVELPVSIVSLPVYHKHTFIVLYVDFKPQSGGGKCFNCYPAGVN
ITLANFNETKGPLCVDTSHFTTKYVAVYANVGRWSASINTGNCPFSFGKVNNFVKFGSVCFS
LKDIPGGCAMPIVANWAYSKYYTIGSLYVSWSDGDGITGVPQPVEGVSSFMNVTLDKCTKYN
IYDVSGVGVIRVSNDTFLNGITYTSTSGNLLGFKDVTKGTIYSITPCNPPDQLVVYQQAVVG
AMLSENFTSYGFSNVVELPKFFYASNGTYNCTDAVLTYSSFGVCADGSIIAVQPRNVSYDSV
SAIVTANLSIPSNWTTSVQVEYLQITSTPIVVDCSTYVCNGNVRCVELLKQYTSACKTIEDA
LRNSARLESADVSEMLTFDKKAFTLANVSSFGDYNLSSVIPSLPTSGSRVAGRSAIEDILFS
KLVTSGLGTVDADYKKCTKGLSIADLACAQYYNGIMVLPGVADAERMAMYTGSLIGGIALGG
LTSAVSIPFSLAIQARLNYVALQTDVLQENQKILAASENKAMTNIVDAFTGVNDAITQTSQA
LQTVATALNKIQDVVNQQGNSLNHLTSQLRQNFQAISSSIQAIYDRLDTIQADQQVDRLITG
RLAALNVFVSHTLTKYTEVRASRQLAQQKVNECVKSQSKRYGFCGNGTHIFSIVNAAPEGLV
FLHTVLLPTQYKDVEAWSGLCVDGTNGYVLRQPNLALYKEGNYYRITSRIMFEPRIPTMADF
VQIENCNVTFVNISRSELQTIVPEYIDVNKTLQELSYKLPNYTVPDLVVEQYNQTILNLTSE
ISTLENKSAELNYTVQKLQTLIDNINSTLVDLKWLNRVETYIKWPWWVWLCISVVLIFVVSM
LLLCCCSTGCCGFFSCFASSIRGCCESTKLPYYDVEKIHIQ
TMCT region of modified PDI-OC43-COV wtTMCT-AA
(SEQ ID NO: 162)
WYVWLLICLAGVAMLVLLFFICCCTGCGTSCFKKCGGCCDDYTGYQELVIKTSHDD
TMCT region of modified PDI-OC43-COV H5iTMCT-AA
(SEQ ID NO: 163)
WYQILSIYSTVASSLALAIMMAGLSLWMCSNGSLQCRICI
TMCT region of modified PDI-OC43-COV H5iCT-AA
(SEQ ID NO: 164)
WYVWLLICLAGVAMLVLLFFISLWMCSNGSLQCRICI
TMCT region of modified PDI-OC43-COV H5iCT(V4)-AA
(SEQ ID NO: 165)
WYVWLLICLAGVAMLVLLFFICCSNGSLQCRICI
TMCT region of modified PDI-OC43-COV HIcCT-AA
(SEQ ID NO: 166)
WYVWLLICLAGVAMLVLLFFISFWMCSNGSLQCRICI
TMCT region of modified PDI-229E-wtTMCT-AA
(SEQ ID NO: 167)
WWVWLCISVVLIFVVSMLLLCCCSTGCCGFFSCFASSIRGCCESTKLPYYDVEKIHIQ
TMCT region of modified PDI-229E-H5iTMCT-AA
(SEQ ID NO: 168)
WWQILSIYSTVASSLALAIMMAGLSLWMCSNGSLQCRICI
TMCT region of modified PDI-229E-H5iCT-AA
(SEQ ID NO: 169)
WWVWLCISVVLIFVVSMLLLSLWMCSNGSLQCRICI
TMCT region of modified PDI-229E-H5iCT(V4)-AA
(SEQ ID NO: 170)
WWVWLCISVVLIFVVSMLLLCCSNGSLQCRICI
TMCT region of modified PDI-229E-H1cCT-AA
(SEQ ID NO: 171)
WWVWLCISVVLIFVVSMLLLSFWMCSNGSLQCRICI
TM/CT Region of Modified OC43-CoV S protein with intervening peptide sequence Xₙ
(SEQ ID NO: 172)
WYVWLLICLAGVAMLVLLFFI - (X)n - CSNGSXXCXICI
TM/CT Region of Modified OC43-CoV S protein with intervening peptide sequence Xₙ
(SEQ ID NO: 173)
WWVWLCISVVLIFVVSMLLL - (X)n - CSNGSXXCXICI

[0426] All citations are hereby incorporated by reference.

[0427] The present invention has been described with regard to one or more embodiments. However, it will be apparent to persons skilled in the art that a number of variations and modifications can be made without departing from the scope of the invention as defined in the claims.

1. A modified coronavirus S-protein comprising, in series,
an ectodomain derived from a coronavirus S-protein,
a transmembrane and cytosolic tail domain (TMCT), wherein the TMCT is a chimeric TMCT, comprising:
a transmembrane domain (TM), wherein the TM or a portion of the TM is derived from a coronavirus S-protein and
a cytosolic tail (CT), wherein the CT or a portion of the CT is derived from an influenza hemagglutinin (HA) protein.

2. The modified coronavirus S-protein of claim 1, wherein the TM is directly fused to the CT.

3. The modified coronavirus S-protein of claim 1, wherein the TM is a chimeric TM comprising a N-terminal sequence derived from the coronavirus S-protein TM and a C-terminal sequence derived from the influenza HA protein TM.

4. The modified coronavirus S-protein of claim 3, wherein the chimeric TM comprises a N-terminal sequence derived from the coronavirus S-protein TM comprising at least 20 amino acids corresponding to amino acids 1-20 of SEQ ID NO: 18 or SEQ ID NO: 169, or at least 21 amino acids corresponding to amino acids 1-21 of SEQ ID NO: 118 or 164, or at least 22 amino acids corresponding to amino acids 1-22 of SEQ ID NO: 123 and one or more than one amino acid from the C-terminal end of the influenza HA protein TM.

5. The modified coronavirus S-protein of claim 4, wherein the one or more than one amino acid from the C-terminal end of the influenza HA protein TM are selected from AGL or conserved substitution of AGL, MAGL or conserved substitution of MAGL.

6. The modified coronavirus S-protein of claim 1, wherein the CT is a chimeric CT comprising a N-terminal sequence derived from the coronavirus S-protein CT and a C-terminal sequence derived from the influenza HA protein CT.

7. The modified coronavirus S-protein of claim 6, wherein the chimeric CT comprises a C-terminal sequence derived from the influenza HA protein CT comprising amino acids corresponding to amino acids 27-37 of SEQ ID NO: 18, 126, 128, 129, 130 or 131; or amino acids corresponding to amino acids 27-36 of SEQ ID NO: 127 and one or more than one amino acid from the N-terminal end of the coronavirus S-protein CT.

8. The modified coronavirus S-protein of claim 7, wherein the one or more than one amino acid from the N-terminal end of the coronavirus S-protein CT are selected from C or a conserved substitution of C, CC or a conserved substitution of CC, or CCM or a or a conserved substitution of CCM.

9. The modified coronavirus S-protein of claim 3, wherein the chimeric TM comprises amino acids corresponding to amino acids 1-20 of SEQ ID NO: 18 or SEQ ID NO: 169, or to amino acids 1-21 of SEQ ID NO: 118 or SEQ ID NO: 164, or amino acids 1-22 of SEQ ID NO: 123.

10. The modified coronavirus S-protein of claim 4, wherein the chimeric CT comprises amino acids corresponding to amino acids of 27-37 of SEQ ID NO: 18, 126, 128, 129, 130 or 131; or amino acids 27-36 of SEQ ID NO: 127.

11. The modified coronavirus S-protein of claim 1, wherein the chimeric TMCT comprises a chimeric TM comprising amino acids corresponding to amino acids 1-20 of SEQ ID NO: 18 or SEQ ID NO: 169, or to amino acids 1-21 of SEQ ID NO: 118 or SEQ ID NO: 164, or amino acids 1-22 of SEQ ID NO: 123 and, a chimeric CT comprising amino acids corresponding to amino acids 27-37 of SEQ ID NO: 18, 126, 128, 129, 130 or 131; amino acids 27-36 of SEQ ID NO: 127 or a combination thereof.

12. The modified S-protein of claim 1, wherein the S-protein comprises one or more than one amino acid substitution when compared to a wild-type coronavirus S-protein amino acid sequence.

13-20. (canceled)

21. The modified S-protein of claim 12, wherein the one or more than one substitution maintains the S-protein in a pre-fusion state or produces are higher yield of the modified S-protein when expressed in a host or host cell, when compared to the yield of a corresponding S-protein without the one or more than one substitutions expressed in the host or host cell.

22.-25. (canceled)

26. The modified S-protein of claim 1, wherein the TMCT comprises a sequence having about 80% to about 100% identity with the sequence of SEQ ID NO: 18, 19, 37, 38, 39, 64, 126, 127, 128, 129, 130, 131, 118, 119, 120, 123, 124, 125, 134, 135, 164, 165, 166, 169, 170, 171, 172 or 173.

27.-32. (canceled)

33. The modified S-protein of claim 1, wherein the S-protein is produced as a precursor, the precursor protein comprising from 80% to 100% identity with amino acids 1-1234 of SEQ ID 1, or with amino acids 1-1234 of SEQ ID NO: 5, with amino acids 1-1243 of SEQ ID NO: 30, with amino acids 1-1227 of SEQ ID NO: 95, with amino acids 1-1325 of SEQ ID NO: 108, with amino acids 1-1216 of SEQ ID NO: 112, with amino acids 1-1318 of SEQ ID NO: 113, with amino acids 1-1335 of SEQ ID NO: 144, with amino acids 1-1143 of SEQ ID NO: 155, with amino acids 1-1325 of SEQ ID NO: 158, with amino acids 1-1135 of SEQ ID NO: 159, and wherein the amino acid sequence of the CT comprises from 80% to 100% identity with the sequence of SEQ ID NO: 15, or with amino acids 35-50 of SEQ ID NO 6, 8, 7, 9, 10, 12, 13 or 14, or with amino acids 34-49 of SEQ ID NO 11, or with amino acids 553-568 of SEQ ID NO:3.

34. A nucleic acid comprising a nucleotide sequence encoding the modified S protein of claim 1.

35. (canceled)

36. A virus like particle (VLP) comprising the modified S-protein of claim 1.

37.-38. (canceled)

39. A vaccine for inducing an immune response, the vaccine comprising an effective dose of the modified S-protein of claim 1.

40. (canceled)

41. A method for inducing immunity to a Coronavirus infection in a subject, the method comprising administering the vaccine of claim 39 to the subject.

42.-45. (canceled)

46. A non-human host or host cell comprising the modified S-protein of claim 1.

47. (canceled)

48. A method of producing a virus like particle (VLP) in a non-human host or host cell comprising:
a) introducing the nucleic acid of claim 34 into the non-human host or host cell, or providing the non-human host or host cell comprising the nucleic acid of claim 34, and
b) incubating the non-human host or host cell under conditions that permit the expression of the nucleic acid, thereby producing the VLP.

49. The method of claim 47, the method further comprising step c) of harvesting the non-human host or host cell.

50-56. (canceled)

57. A composition comprising a virus-like particles (VLP), the VLP comprising a modified coronavirus S-protein comprising, in series, an ectodomain derived from a coronavirus S-protein, a transmembrane and cytosolic tail domain (TMCT), wherein the TMCT is a chimeric TMCT, comprising: a transmembrane domain (TM), wherein the TM or a portion of the TM is derived from a coronavirus S-protein and a cytosolic tail (CT), wherein the CT or a portion of the CT is derived from an influenza hemagglutinin (HA) protein and wherein the S-protein comprises substitutions at positions 667, 668, 670, 971 and 972 when compared to reference amino acid sequence of SEQ ID NO: 2.

58. A composition comprising a virus-like particle (VLP), the VLP comprising a modified coronavirus S-protein comprising, in series, an ectodomain derived from a coronavirus S-protein, a transmembrane and cytosolic tail domain (TMCT), wherein the TMCT is a chimeric TMCT, comprising: a transmembrane domain (TM), wherein the TM or a portion of the TM is derived from a coronavirus S-protein and a cytosolic tail (CT), wherein the CT or a portion of the CT is derived from an influenza hemagglutinin (HA) protein and wherein the S-protein comprises a glycine substitution at position 667, a serine substitution at position 668, a serine substitution at position 670, a proline substitution at position 971 and a proline substitution at position 972, the position corresponding to reference amino acid sequence of SEQ ID NO: 2.

59. A composition comprising a virus-like particle (VLP), the VLP comprising a modified coronavirus S-protein, the modified S-protein comprising the sequence of SEQ ID NO: 21 or amino acids 25-1259 of SEQ ID NO: 51.

60. (canceled)

The application's sequence listing, which the Patent Office published only in electronic form, follows.

SEQUENCE LISTING (173 sequences)

SEQ ID NO: 1 - protein, 1273 aa, SARS-CoV-2
MFVFLVLLPLVSSQCVNLTTRTQLPPAYTNSFTRGVYYPDKVFRSSVLHSTQDLFLPFFSNVTWFHAIHVSGTNGTKRFDNPVLPFNDGVYFASTEKSNIIRGWIFGTTLDSKTQSLLIVNNATNVVIKVCEFQFCNDPFLGVYYHKNNKSWMESEFRVYSSANNCTFEYVSQPFLMDLEGKQGNFKNLREFVFKNIDGYFKIYSKHTPINLVRDLPQGFSALEPLVDLPIGINITRFQTLLALHRSYLTPGDSSSGWTAGAAAYYVGYLQPRTFLLKYNENGTITDAVDCALDPLSETKCTLKSFTVEKGIYQTSNFRVQPTESIVRFPNITNLCPFGEVFNATRFASVYAWNRKRISNCVADYSVLYNSASFSTFKCYGVSPTKLNDLCFTNVYADSFVIRGDEVRQIAPGQTGKIADYNYKLPDDFTGCVIAWNSNNLDSKVGGNYNYLYRLFRKSNLKPFERDISTEIYQAGSTPCNGVEGFNCYFPLQSYGFQPTNGVGYQPYRVVVLSFELLHAPATVCGPKKSTNLVKNKCVNFNFNGLTGTGVLTESNKKFLPFQQFGRDIADTTDAVRDPQTLEILDITPCSFGGVSVITPGTNTSNQVAVLYQDVNCTEVPVAIHADQLTPTWRVYSTGSNVFQTRAGCLIGAEHVNNSYECDIPIGAGICASYQTQTNSPRRARSVASQSIIAYTMSLGAENSVAYSNNSIAIPTNFTISVTTEILPVSMTKTSVDCTMYICGDSTECSNLLLQYGSFCTQLNRALTGIAVEQDKNTQEVFAQVKQIYKTPPIKDFGGFNFSQILPDPSKPSKRSFIEDLLFNKVTLADAGFIKQYGDCLGDIAARDLICAQKFNGLTVLPPLLTDEMIAQYTSALLAGTITSGWTFGAGAALQIPFAMQMAYRFNGIGVTQNVLYENQKLIANQFNSAIGKIQDSLSSTASALGKLQDVVNQNAQALNTLVKQLSSNFGAISSVLNDILSRLDKVEAEVQIDRLITGRLQSLQTYVTQQLIRAAEIRASANLAATKMSECVLGQSKRVDFCGKGYHLMSFPQSAPHGVVFLHVTYVPAQEKNFTTAPAICHDGKAHFPREGVFVSNGTHWFVTQRNFYEPQIITTDNTFVSGNCDVVIGIVNNTVYDPLQPELDSFKEELDKYFKNHTSPDVDLGDISGINASVVNIQKEIDRLNEVAKNLNESLIDLQELGKYEQYIKWPWYIWLGFIAGLIAIVMVTIMLCCMTSCCSCLKGCCSCGSCCKFDEDDSEPVLKGVKLHYT

SEQ ID NO: 2 - protein, 1258 aa, SARS-CoV-2
VNLTTRTQLPPAYTNSFTRGVYYPDKVFRSSVLHSTQDLFLPFFSNVTWFHAIHVSGTNGTKRFDNPVLPFNDGVYFASTEKSNIIRGWIFGTTLDSKTQSLLIVNNATNVVIKVCEFQFCNDPFLGVYYHKNNKSWMESEFRVYSSANNCTFEYVSQPFLMDLEGKQGNFKNLREFVFKNIDGYFKIYSKHTPINLVRDLPQGFSALEPLVDLPIGINITRFQTLLALHRSYLTPGDSSSGWTAGAAAYYVGYLQPRTFLLKYNENGTITDAVDCALDPLSETKCTLKSFTVEKGIYQTSNFRVQPTESIVRFPNITNLCPFGEVFNATRFASVYAWNRKRISNCVADYSVLYNSASFSTFKCYGVSPTKLNDLCFTNVYADSFVIRGDEVRQIAPGQTGKIADYNYKLPDDFTGCVIAWNSNNLDSKVGGNYNYLYRLFRKSNLKPFERDISTEIYQAGSTPCNGVEGFNCYFPLQSYGFQPTNGVGYQPYRVVVLSFELLHAPATVCGPKKSTNLVKNKCVNFNFNGLTGTGVLTESNKKFLPFQQFGRDIADTTDAVRDPQTLEILDITPCSFGGVSVITPGTNTSNQVAVLYQDVNCTEVPVAIHADQLTPTWRVYSTGSNVFQTRAGCLIGAEHVNNSYECDIPIGAGICASYQTQTNSPRRARSVASQSIIAYTMSLGAENSVAYSNNSIAIPTNFTISVTTEILPVSMTKTSVDCTMYICGDSTECSNLLLQYGSFCTQLNRALTGIAVEQDKNTQEVFAQVKQIYKTPPIKDFGGFNFSQILPDPSKPSKRSFIEDLLFNKVTLADAGFIKQYGDCLGDIAARDLICAQKFNGLTVLPPLLTDEMIAQYTSALLAGTITSGWTFGAGAALQIPFAMQMAYRFNGIGVTQNVLYENQKLIANQFNSAIGKIQDSLSSTASALGKLQDVVNQNAQALNTLVKQLSSNFGAISSVLNDILSRLDKVEAEVQIDRLITGRLQSLQTYVTQQLIRAAEIRASANLAATKMSECVLGQSKRVDFCGKGYHLMSFPQSAPHGVVFLHVTYVPAQEKNFTTAPAICHDGKAHFPREGVFVSNGTHWFVTQRNFYEPQIITTDNTFVSGNCDVVIGIVNNTVYDPLQPELDSFKEELDKYFKNHTSPDVDLGDISGINASVVNIQKEIDRLNEVAKNLNESLIDLQELGKYEQYIKWPWYIWLGFIAGLIAIVMVTIMLCCMTSCCSCLKGCCSCGSCCKFDEDDSEPVLKGVKLHYT

SEQ ID NO: 3 - protein, 568 aa, Influenza
MEKIVLLLAIVSLVKSDQICIGYHANNSTEQVDTIMEKNVTVTHAQDILEKTHNGKLCDLDGVKPLILRDCSVAGWLLGNPMCDEFINVPEWSYIVEKANPTNDLCYPGSFNDYEELKHLLSRINHFEKIQIIPKSSWSDHEASSGVSSACPYLGSPSFFRNVVWLIKKNSTYPTIKKSYNNTNQEDLLVLWGIHHPNDAAEQTRLYQNPTTYISIGTSTLNQRLVPKIATRSKVNGQSGRMEFFWTILKPNDAINFESNGNFIAPEYAYKIVKKGDSAIMKSELEYGNCNTKCQTPMGAINSSMPFHNIHPLTIGECPKYVKSNRLVLATGLRNSPQRESRRKKRGLFGAIAGFIEGGWQGMVDGWYGYHHSNEQGSGYAADKESTQKAIDGVTNKVNSIIDKMNTQFEAVGREFNNLERRIENLNKKMEDGFLDVWTYNAELLVLMENERTLDFHDSNVKNLYDKVRLQLRDNAKELGNGCFEFYHKCDNECMESIRNGTYNYPQYSEEARLKREEISGVKLESIGTYQILSIYSTVASSLALAIMMAGLSLWMCSNGSLQCRICI

SEQ ID NO: 4 - DNA, 1729 bp, Influenza
ctgtaaaaatggagaaaatagtgcttcttcttgcaatagtcagtcttgttaaaagtgatcagatttgcattggttaccatgcaaacaattcaacagagcaggttgacacaatcatggaaaagaacgttactgttacacatgcccaagacatactggaaaagacacacaacgggaagctctgcgatctagatggagtgaagcctctaattttaagagattgtagtgtagctggatggctcctcgggaacccaatgtgtgacgaattcatcaatgtaccggaatggtcttacatagtggagaaggccaatccaaccaatgacctctgttacccagggagtttcaacgactatgaagaactgaaacacctattgagcagaataaaccattttgagaaaattcaaatcatccccaaaagttcttggtccgatcatgaagcctcatcaggagtgagctcagcatgtccatacctgggaagtccctccttttttagaaatgtggtatggcttatcaaaaagaacagtacatacccaacaataaagaaaagctacaataataccaaccaagaagatcttttggtactgtggggaattcaccatcctaatgatgcggcagagcagacaaggctatatcaaaacccaaccacctatatttccattgggacatcaacactaaaccagagattggtaccaaaaatagctactagatccaaagtaaacgggcaaagtggaaggatggagttcttctggacaattttaaaacctaatgatgcaatcaacttcgagagtaatggaaatttcattgctccagaatatgcatacaaaattgtcaagaaaggggactcagcaattatgaaaagtgaattggaatatggtaactgcaacaccaagtgtcaaactccaatgggggcgataaactctagtatgccattccacaacatacaccctctcaccatcggggaatgccccaaatatgtgaaatcaaacagattagtccttgcaacagggctcagaaatagccctcaaagagagagcagaagaaaaaagagaggactatttggagctatagcaggttttatagagggaggatggcagggaatggtagatggttggtatgggtaccaccatagcaatgagcaggggagtgggtacgctgcagacaaagaatccactcaaaaggcaatagatggagtcaccaataaggtcaactcaatcattgacaaaatgaacactcagtttgaggccgttggaagggaatttaataacttagaaaggagaatagagaatttaaacaagaagatggaagacgggtttctagatgtctggacttataatgccgaacttctggttctcatggaaaatgagagaactctagactttcatgactcaaatgttaagaacctctacgacaaggtccgactacagcttagggataatgcaaaggagctgggtaacggttgtttcgagttctatcacaaatgtgataatgaatgtatggaaagtataagaaacggaacgtacaactatccgcagtattcagaagaagcaagattaaaaagagaggaaataagtggggtaaaattggaatcaataggaacttaccaaatactgtcaatttattcaacagtggcgagttccctagcactggcaatcatgatggctggtctatctttatggatgtgctccaatggatcgttacaatgcagaatttgcatttaaatttgtgagttcag

SEQ ID NO: 5 - protein, 1250 aa, Artificial Sequence
  Modified SARS-CoV-2 with H5 A/Indonesia/5/05 Hemagglutinin CT AA
MFVFLVLLPLVSSQCVNLTTRTQLPPAYTNSFTRGVYYPDKVFRSSVLHSTQDLFLPFFSNVTWFHAIHVSGTNGTKRFDNPVLPFNDGVYFASTEKSNIIRGWIFGTTLDSKTQSLLIVNNATNVVIKVCEFQFCNDPFLGVYYHKNNKSWMESEFRVYSSANNCTFEYVSQPFLMDLEGKQGNFKNLREFVFKNIDGYFKIYSKHTPINLVRDLPQGFSALEPLVDLPIGINITRFQTLLALHRSYLTPGDSSSGWTAGAAAYYVGYLQPRTFLLKYNENGTITDAVDCALDPLSETKCTLKSFTVEKGIYQTSNFRVQPTESIVRFPNITNLCPFGEVFNATRFASVYAWNRKRISNCVADYSVLYNSASFSTFKCYGVSPTKLNDLCFTNVYADSFVIRGDEVRQIAPGQTGKIADYNYKLPDDFTGCVIAWNSNNLDSKVGGNYNYLYRLFRKSNLKPFERDISTEIYQAGSTPCNGVEGFNCYFPLQSYGFQPTNGVGYQPYRVVVLSFELLHAPATVCGPKKSTNLVKNKCVNFNFNGLTGTGVLTESNKKFLPFQQFGRDIADTTDAVRDPQTLEILDITPCSFGGVSVITPGTNTSNQVAVLYQDVNCTEVPVAIHADQLTPTWRVYSTGSNVFQTRAGCLIGAEHVNNSYECDIPIGAGICASYQTQTNSPRRARSVASQSIIAYTMSLGAENSVAYSNNSIAIPTNFTISVTTEILPVSMTKTSVDCTMYICGDSTECSNLLLQYGSFCTQLNRALTGIAVEQDKNTQEVFAQVKQIYKTPPIKDFGGFNFSQILPDPSKPSKRSFIEDLLFNKVTLADAGFIKQYGDCLGDIAARDLICAQKFNGLTVLPPLLTDEMIAQYTSALLAGTITSGWTFGAGAALQIPFAMQMAYRFNGIGVTQNVLYENQKLIANQFNSAIGKIQDSLSSTASALGKLQDVVNQNAQALNTLVKQLSSNFGAISSVLNDILSRLDKVEAEVQIDRLITGRLQSLQTYVTQQLIRAAEIRASANLAATKMSECVLGQSKRVDFCGKGYHLMSFPQSAPHGVVFLHVTYVPAQEKNFTTAPAICHDGKAHFPREGVFVSNGTHWFVTQRNFYEPQIITTDNTFVSGNCDVVIGIVNNTVYDPLQPELDSFKEELDKYFKNHTSPDVDLGDISGINASVVNIQKEIDRLNEVAKNLNESLIDLQELGKYEQYIKWPWYIWLGFIAGLIAIVMVTIMLSLWMCSNGSLQCRICI

SEQ ID NO: 6 - protein, 50 aa, Influenza
IDGVKLESTRIYQILAIYSTVASSLVLVVSLGAISFWMCSNGSLQCRICI

SEQ ID NO: 7 - protein, 50 aa, Influenza
IKGVKLSSMGVYQILAIYATVAGSLSLAIMMAGISFWMCSNGSLQCRICI

SEQ ID NO: 8 - protein, 49 aa, Influenza
IKGVELKSGYKDWILWISFAISCFLLCVALLGFIMWACQKGNIRCNICI

SEQ ID NO: 9 - protein, 50 aa, Influenza
ISGVKLESIGTYQILSIYSTVASSLALAIMMAGLSLWMCSNGSLQCRICI

SEQ ID NO: 10 - protein, 50 aa, Influenza
IESVKLENLGVYQILAIYSTVSSSLVLVGLIMAMGLWMCSNGSMQCRICI

SEQ ID NO: 11 - protein, 49 aa, Influenza
IDPVKLSSGYKDVILWFSFGASCFILLAIVMGLVFICVKNGNMRCTICI

SEQ ID NO: 12 - protein, 50 aa, Influenza
IEGVKLESEGTYKILTIYSTVASSLVLAMGFAAFLFWAMSNGSCRCNICI

SEQ ID NO: 13 - protein, 50 aa, Influenza
AASLNDDGLDNHTILLYYSTAASSLAVTLMIAIFVVYMVSRDNVSCSICL

SEQ ID NO: 14 - protein, 50 aa, Artificial Sequence
  Consensus Sequence of C-Terminal Region of Influenza Hemagglutinin
  misc_feature (2)..(2): Xaa can be any naturally occurring amino acid
  misc_feature (7)..(7): Xaa can be any naturally occurring amino acid
  misc_feature (9)..(9): Xaa can be any naturally occurring amino acid
  misc_feature (11)..(11): Xaa can be any naturally occurring amino acid
  misc_feature (13)..(13): Xaa can be any naturally occurring amino acid
  misc_feature (16)..(16): Xaa can be any naturally occurring amino acid
  misc_feature (26)..(26): Xaa can be any naturally occurring amino acid
  misc_feature (28)..(36): Xaa can be any naturally occurring amino acid
  misc_feature (44)..(45): Xaa can be any naturally occurring amino acid
  misc_feature (47)..(47): Xaa can be any naturally occurring amino acid
IXGVKLXSXGXYXILXIYSTVASSLXLXXXXXXXXXWMCSNGSXXCXICI

SEQ ID NO: 15 - protein, 16 aa, Artificial Sequence
  Consensus Sequence of CT Domain of Influenza Hemagglutinin
  misc_feature (1)..(2): Xaa can be any naturally occurring amino acid
  misc_feature (10)..(11): Xaa can be any naturally occurring amino acid
  misc_feature (13)..(13): Xaa can be any naturally occurring amino acid
XXWMCSNGSXXCXICI

SEQ ID NO: 16 - protein, 69 aa, SARS-CoV-2
WYEQYIKWPWYIWLGFIAGLIAIVMVTIMLCCMTSCCSCLKGCCSCGSCCKFDEDDSEPVLKGVKLHYT

SEQ ID NO: 17 - protein, 50 aa, Influenza; identical to SEQ ID NO: 9

SEQ ID NO: 18 - protein, 37 aa, Artificial Sequence
  C-Terminal Region of Modified SARS-CoV-2 S protein with H5i Hemagglutinin CT
WYIWLGFIAGLIAIVMVTIMLSLWMCSNGSLQCRICI

SEQ ID NO: 19 - protein, 40 aa, Artificial Sequence
  C-Terminal Region of Modified SARS-CoV-2 S protein with H5i Hemagglutinin CT, Variation 1
WYIWLGFIAGLIAIVMVTIMMAGLSLWMCSNGSLQCRICI

SEQ ID NO: 20 - protein, 1258 aa, Artificial Sequence
  (no SP) SARS-CoV-2 S protein GSAS+PP wtTM/CT AA
VNLTTRTQLPPAYTNSFTRGVYYPDKVFRSSVLHSTQDLFLPFFSNVTWFHAIHVSGTNGTKRFDNPVLPFNDGVYFASTEKSNIIRGWIFGTTLDSKTQSLLIVNNATNVVIKVCEFQFCNDPFLGVYYHKNNKSWMESEFRVYSSANNCTFEYVSQPFLMDLEGKQGNFKNLREFVFKNIDGYFKIYSKHTPINLVRDLPQGFSALEPLVDLPIGINITRFQTLLALHRSYLTPGDSSSGWTAGAAAYYVGYLQPRTFLLKYNENGTITDAVDCALDPLSETKCTLKSFTVEKGIYQTSNFRVQPTESIVRFPNITNLCPFGEVFNATRFASVYAWNRKRISNCVADYSVLYNSASFSTFKCYGVSPTKLNDLCFTNVYADSFVIRGDEVRQIAPGQTGKIADYNYKLPDDFTGCVIAWNSNNLDSKVGGNYNYLYRLFRKSNLKPFERDISTEIYQAGSTPCNGVEGFNCYFPLQSYGFQPTNGVGYQPYRVVVLSFELLHAPATVCGPKKSTNLVKNKCVNFNFNGLTGTGVLTESNKKFLPFQQFGRDIADTTDAVRDPQTLEILDITPCSFGGVSVITPGTNTSNQVAVLYQDVNCTEVPVAIHADQLTPTWRVYSTGSNVFQTRAGCLIGAEHVNNSYECDIPIGAGICASYQTQTNSPGSASSVASQSIIAYTMSLGAENSVAYSNNSIAIPTNFTISVTTEILPVSMTKTSVDCTMYICGDSTECSNLLLQYGSFCTQLNRALTGIAVEQDKNTQEVFAQVKQIYKTPPIKDFGGFNFSQILPDPSKPSKRSFIEDLLFNKVTLADAGFIKQYGDCLGDIAARDLICAQKFNGLTVLPPLLTDEMIAQYTSALLAGTITSGWTFGAGAALQIPFAMQMAYRFNGIGVTQNVLYENQKLIANQFNSAIGKIQDSLSSTASALGKLQDVVNQNAQALNTLVKQLSSNFGAISSVLNDILSRLDPPEAEVQIDRLITGRLQSLQTYVTQQLIRAAEIRASANLAATKMSECVLGQSKRVDFCGKGYHLMSFPQSAPHGVVFLHVTYVPAQEKNFTTAPAICHDGKAHFPREGVFVSNGTHWFVTQRNFYEPQIITTDNTFVSGNCDVVIGIVNNTVYDPLQPELDSFKEELDKYFKNHTSPDVDLGDISGINASVVNIQKEIDRLNEVAKNLNESLIDLQELGKYEQYIKWPWYIWLGFIAGLIAIVMVTIMLCCMTSCCSCLKGCCSCGSCCKFDEDDSEPVLKGVKLHYT

SEQ ID NO: 21 - protein, 1235 aa, Artificial Sequence
  (no SP) Modified SARS-CoV-2 S protein GSAS+PP with H5i Hemagglutinin CT AA
VNLTTRTQLPPAYTNSFTRGVYYPDKVFRSSVLHSTQDLFLPFFSNVTWFHAIHVSGTNGTKRFDNPVLPFNDGVYFASTEKSNIIRGWIFGTTLDSKTQSLLIVNNATNVVIKVCEFQFCNDPFLGVYYHKNNKSWMESEFRVYSSANNCTFEYVSQPFLMDLEGKQGNFKNLREFVFKNIDGYFKIYSKHTPINLVRDLPQGFSALEPLVDLPIGINITRFQTLLALHRSYLTPGDSSSGWTAGAAAYYVGYLQPRTFLLKYNENGTITDAVDCALDPLSETKCTLKSFTVEKGIYQTSNFRVQPTESIVRFPNITNLCPFGEVFNATRFASVYAWNRKRISNCVADYSVLYNSASFSTFKCYGVSPTKLNDLCFTNVYADSFVIRGDEVRQIAPGQTGKIADYNYKLPDDFTGCVIAWNSNNLDSKVGGNYNYLYRLFRKSNLKPFERDISTEIYQAGSTPCNGVEGFNCYFPLQSYGFQPTNGVGYQPYRVVVLSFELLHAPATVCGPKKSTNLVKNKCVNFNFNGLTGTGVLTESNKKFLPFQQFGRDIADTTDAVRDPQTLEILDITPCSFGGVSVITPGTNTSNQVAVLYQDVNCTEVPVAIHADQLTPTWRVYSTGSNVFQTRAGCLIGAEHVNNSYECDIPIGAGICASYQTQTNSPGSASSVASQSIIAYTMSLGAENSVAYSNNSIAIPTNFTISVTTEILPVSMTKTSVDCTMYICGDSTECSNLLLQYGSFCTQLNRALTGIAVEQDKNTQEVFAQVKQIYKTPPIKDFGGFNFSQILPDPSKPSKRSFIEDLLFNKVTLADAGFIKQYGDCLGDIAARDLICAQKFNGLTVLPPLLTDEMIAQYTSALLAGTITSGWTFGAGAALQIPFAMQMAYRFNGIGVTQNVLYENQKLIANQFNSAIGKIQDSLSSTASALGKLQDVVNQNAQALNTLVKQLSSNFGAISSVLNDILSRLDPPEAEVQIDRLITGRLQSLQTYVTQQLIRAAEIRASANLAATKMSECVLGQSKRVDFCGKGYHLMSFPQSAPHGVVFLHVTYVPAQEKNFTTAPAICHDGKAHFPREGVFVSNGTHWFVTQRNFYEPQIITTDNTFVSGNCDVVIGIVNNTVYDPLQPELDSFKEELDKYFKNHTSPDVDLGDISGINASVVNIQKEIDRLNEVAKNLNESLIDLQELGKYEQYIKWPWYIWLGFIAGLIAIVMVTIMLSLWMCSNGSLQCRICI

SEQ ID NO: 22 - DNA, 3849 bp, Artificial Sequence
  PDI-SARS-CoV-2 S protein GSAS+PP wtTM/CT-DNA
atggcgaaaaacgttgcgattttcggcttattgttttctcttcttgtgttggttccttctcagatcttcgcggtgaatcttacgacgcgaacacagttaccacccgcatatacaaatagcttcactcggggtgtttattaccccgacaaagtgttcaggtcctccgtgctccactcaacacaggacctctttcttcctttcttttctaacgtgacatggtttcatgccattcatgtatccggcactaacggtactaagaggttcgataatcctgtgctccctttcaatgacggcgtttactttgcaagcacagagaagagtaacatcatccgaggttggatctttggcactaccctcgattcaaagacgcagagcctcctcattgtgaacaatgccactaacgtggtgatcaaagtttgcgagtttcagttctgcaatgaccctttcttgggggtgtactatcataagaacaacaagtcttggatggaatctgaattccgcgtctatagcagcgccaacaactgcacctttgaatacgtgtcccagcccttccttatggacctggagggaaagcagggaaactttaagaatctgagagagttcgtgtttaaaaatatcgacggctattttaagatctattctaagcacacgcctattaatctcgtgcgcgatcttccacaaggcttcagcgccctggaaccactcgtggacctcccaattggtatcaacatcactagatttcagactctgcttgccctccaccgatcctatctgacacccggagactcctctagcggctggactgccggcgctgccgcttattacgttggttatcttcagccacgcacgttcctgctgaagtataacgagaatggtactattaccgatgccgtggattgtgcccttgaccccctgtccgaaactaagtgcacactcaagtcattcactgtggaaaaaggaatctaccagacaagcaattttcgggtccagcctactgagagcattgtgcgctttcctaacatcacaaatctttgccccttcggagaggttttcaatgctacacggtttgcctccgtgtatgcctggaaccgcaagagaatttccaattgcgtggccgattactccgtgctctacaatagtgcaagctttagcacctttaagtgctatggcgtatcccctactaagcttaacgacttgtgtttcacaaacgtgtatgccgactcctttgtgatacggggcgacgaagttagacagatagcaccaggacagacgggaaagatagctgactacaactataagcttcctgatgacttcactggctgcgttatcgcgtggaattctaacaacctggactcaaaagtcggcggcaactataactatctctatcggctgttccgcaagagtaaccttaagccctttgagagagatataagcactgaaatctaccaggctggcagtacgccctgtaatggcgtggaaggctttaattgttattttccactgcaatcctatggttttcagccaaccaatggcgtgggctaccaaccataccgcgtcgtggtgctctcctttgaactgctccacgctcccgcgactgtctgcggccccaagaagtccacgaaccttgtgaagaataagtgcgttaattttaatttcaacggcctcactggaacaggagtgctcactgagagtaacaagaagttcctgccatttcaacaatttggcagagacatagccgatactactgacgccgttagggacccccagaccctcgagattctcgatataacgccctgctccttcggtggagtttccgtgatcacgccaggcaccaataccagtaaccaggtcgccgtgctgtatcaggatgtcaactgtactgaggtgcccgtagccatccatgcggatcagctcacaccaacttggagggtgtacagcaccggctccaatgtattccagactcgggccggatgccttattggcgccgaacacgtgaacaatagttacgaatgcgatattccaattggcgccggaatctgtgctagctaccagactcagacgaactccccaggcagcgccagcagcgttgccagccagtcaatcatcgcttatacaatgtcacttggagccgaaaactccgtggcttactcaaacaacagcatcgccatccccacaaacttcaccatatccgtgacaactgagattctgccagtgtccatgactaagacgtccgtagattgcactatgtacatatgcggcgacagcacagaatgttctaatctgctgctgcaatatggaagcttctgcactcaactgaacagagcgctcacaggcatcgccgtggagcaggataagaatacccaggaggtgttcgcccaagttaagcagatctacaagaccccacccataaaggatttcggtggattcaattttagtcagatactcccagacccatctaagccatccaagaggagctttatcgaggatcttttgtttaacaaagttactctggccgacgccggtttcatcaagcagtacggagattgcctcggcgacatcgctgctcgtgacctcatctgtgcgcaaaagtttaacggtctgacggtgctgcctcccctccttactgatgaaatgatcgcccagtataccagcgcactcctcgctggcaccataacatccggttggacattcggcgctggtgcagcactgcagataccattcgccatgcaaatggcatatcgtttcaacggtatcggtgtcacacagaatgtcctatatgagaaccagaagctgatcgcaaatcagttcaatagtgccatcggaaaaatccaggatagccttagcagcacagcctcagcccttggcaaactccaggatgtcgtgaaccagaatgcccaggctctcaataccctcgtgaagcagctctcatctaatttcggcgcaatttccagtgtcctcaacgacatcctcagccgcctcgacccccccgaggccgaagtgcagattgacagactgattacaggtcgactccagagcctccagacttacgtgactcagcagctgataagagccgccgagataagggccagcgctaacctggctgccacaaagatgtctgagtgcgtgctgggccagtccaagagagtagacttctgtggcaaaggctaccatctgatgagcttcccacaatccgcacctcacggcgtagtgttcctccacgtgacatatgtaccggctcaggagaagaatttcactaccgctcctgctatatgccatgatggaaaggctcacttcccccgggagggggtgttcgtgtccaacggcacccattggtttgtgactcagcggaatttctacgaaccccagatcataaccactgacaacacatttgtgtccggaaattgtgacgtggtcattggaatagtgaacaacactgtttatgatccactgcagccagaacttgacagctttaaggaggagctcgacaagtacttcaagaatcatacgtcaccagatgtggacctcggagatattagcggtatcaatgccagtgttgtcaatattcagaaggaaatagaccgccttaatgaggtcgccaaaaatctgaacgagagcctcatcgatcttcaggagctgggcaaatatgagcagtacatcaagtggccttggtatatttggcttggcttcatcgccggcctgatcgccatagtaatggtcacaattatgctctgctgcatgacctcttgctgctcctgtctgaaaggctgctgctcttgcggatcctgctgcaaatttgatgaggatgacagtgaaccagtcctgaagggcgtgaagctgcactatacttag

SEQ ID NO: 23 - protein, 1282 aa, Artificial Sequence
  PDI-SARS-CoV-2 S protein GSAS+PP wtTM/CT-AA
MAKNVAIFGLLFSLLVLVPSQIFAVNLTTRTQLPPAYTNSFTRGVYYPDKVFRSSVLHSTQDLFLPFFSNVTWFHAIHVSGTNGTKRFDNPVLPFNDGVYFASTEKSNIIRGWIFGTTLDSKTQSLLIVNNATNVVIKVCEFQFCNDPFLGVYYHKNNKSWMESEFRVYSSANNCTFEYVSQPFLMDLEGKQGNFKNLREFVFKNIDGYFKIYSKHTPINLVRDLPQGFSALEPLVDLPIGINITRFQTLLALHRSYLTPGDSSSGWTAGAAAYYVGYLQPRTFLLKYNENGTITDAVDCALDPLSETKCTLKSFTVEKGIYQTSNFRVQPTESIVRFPNITNLCPFGEVFNATRFASVYAWNRKRISNCVADYSVLYNSASFSTFKCYGVSPTKLNDLCFTNVYADSFVIRGDEVRQIAPGQTGKIADYNYKLPDDFTGCVIAWNSNNLDSKVGGNYNYLYRLFRKSNLKPFERDISTEIYQAGSTPCNGVEGFNCYFPLQSYGFQPTNGVGYQPYRVVVLSFELLHAPATVCGPKKSTNLVKNKCVNFNFNGLTGTGVLTESNKKFLPFQQFGRDIADTTDAVRDPQTLEILDITPCSFGGVSVITPGTNTSNQVAVLYQDVNCTEVPVAIHADQLTPTWRVYSTGSNVFQTRAGCLIGAEHVNNSYECDIPIGAGICASYQTQTNSPGSASSVASQSIIAYTMSLGAENSVAYSNNSIAIPTNFTISVTTEILPVSMTKTSVDCTMYICGDSTECSNLLLQYGSFCTQLNRALTGIAVEQDKNTQEVFAQVKQIYKTPPIKDFGGFNFSQILPDPSKPSKRSFIEDLLFNKVTLADAGFIKQYGDCLGDIAARDLICAQKFNGLTVLPPLLTDEMIAQYTSALLAGTITSGWTFGAGAALQIPFAMQMAYRFNGIGVTQNVLYENQKLIANQFNSAIGKIQDSLSSTASALGKLQDVVNQNAQALNTLVKQLSSNFGAISSVLNDILSRLDPPEAEVQIDRLITGRLQSLQTYVTQQLIRAAEIRASANLAATKMSECVLGQSKRVDFCGKGYHLMSFPQSAPHGVVFLHVTYVPAQEKNFTTAPAICHDGKAHFPREGVFVSNGTHWFVTQRNFYEPQIITTDNTFVSGNCDVVIGIVNNTVYDPLQPELDSFKEELDKYFKNHTSPDVDLGDISGINASVVNIQKEIDRLNEVAKNLNESLIDLQELGKYEQYIKWPWYIWLGFIAGLIAIVMVTIMLCCMTSCCSCLKGCCSCGSCCKFDEDDSEPVLKGVKLHYT

SEQ ID NO: 24 - DNA, 52 bp, Artificial Sequence
  IF(PDI)-CoV(opt2).c
tctcagatcttcgcggtgaatcttacgacgcgaacacagttaccacccgcat

SEQ ID NO: 25 - DNA, 51 bp, Artificial Sequence
  IF(AVB)-CoV(opt2).r
acgacacgactaaggcctctaagtatagtgcagcttcacgcccttcaggac

SEQ ID NO: 26 - DNA, 3789 bp, Artificial Sequence
  PDI-Modified SARS-CoV-2 S protein GSAS+PP H5iTM/CT-DNA
atggcgaaaaacgttgcgattttcggcttattgttttctcttcttgtgttggttccttctcagatcttcgcggtgaatcttacgacgcgaacacagttaccacccgcatatacaaatagcttcactcggggtgtttattaccccgacaaagtgttcaggtcctccgtgctccactcaacacaggacctctttcttcctttcttttctaacgtgacatggtttcatgccattcatgtatccggcactaacggtactaagaggttcgataatcctgtgctccctttcaatgacggcgtttactttgcaagcacagagaagagtaacatcatccgaggttggatctttggcactaccctcgattcaaagacgcagagcctcctcattgtgaacaatgccactaacgtggtgatcaaagtttgcgagtttcagttctgcaatgaccctttcttgggggtgtactatcataagaacaacaagtcttggatggaatctgaattccgcgtctatagcagcgccaacaactgcacctttgaatacgtgtcccagcccttccttatggacctggagggaaagcagggaaactttaagaatctgagagagttcgtgtttaaaaatatcgacggctattttaagatctattctaagcacacgcctattaatctcgtgcgcgatcttccacaaggcttcagcgccctggaaccactcgtggacctcccaattggtatcaacatcactagatttcagactctgcttgccctccaccgatcctatctgacacccggagactcctctagcggctggactgccggcgctgccgcttattacgttggttatcttcagccacgcacgttcctgctgaagtataacgagaatggtactattaccgatgccgtggattgtgcccttgaccccctgtccgaaactaagtgcacactcaagtcattcactgtggaaaaaggaatctaccagacaagcaattttcgggtccagcctactgagagcattgtgcgctttcctaacatcacaaatctttgccccttcggagaggttttcaatgctacacggtttgcctccgtgtatgcctggaaccgcaagagaatttccaattgcgtggccgattactccgtgctctacaatagtgcaagctttagcacctttaagtgctatggcgtatcccctactaagcttaacgacttgtgtttcacaaacgtgtatgccgactcctttgtgatacggggcgacgaagttagacagatagcaccaggacagacgggaaagatagctgactacaactataagcttcctgatgacttcactggctgcgttatcgcgtggaattctaacaacctggactcaaaagtcggcggcaactataactatctctatcggctgttccgcaagagtaaccttaagccctttgagagagatataagcactgaaatctaccaggctggcagtacgccctgtaatggcgtggaaggctttaattgttattttccactgcaatcctatggttttcagccaaccaatggcgtgggctaccaaccataccgcgtcgtggtgctctcctttgaactgctccacgctcccgcgactgtctgcggccccaagaagtccacgaaccttgtgaagaataagtgcgttaattttaatttcaacggcctcactggaacaggagtgctcactgagagtaacaagaagttcctgccatttcaacaatttggcagagacatagccgatactactgacgccgttagggacccccagaccctcgagattctcgatataacgccctgctccttcggtggagtttccgtgatcacgccaggcaccaataccagtaaccaggtcgccgtgctgtatcaggatgtcaactgtactgaggtgcccgtagccatccatgcggatcagctcacaccaacttggagggtgtacagcaccggctccaatgtattccagactcgggccggatgccttattggcgccgaacacgtgaacaatagttacgaatgcgatattccaattggcgccggaatctgtgctagctaccagactcagacgaactccccaggcagcgccagcagcgttgccagccagtcaatcatcgcttatacaatgtcacttggagccgaaaactccgtggcttactcaaacaacagcatcgccatccccacaaacttcaccatatccgtgacaactgagattctgccagtgtccatgactaagacgtccgtagattgcactatgtacatatgcggcgacagcacagaatgttctaatctgctgctgcaatatggaagcttctgcactcaactgaacagagcgctcacaggcatcgccgtggagcaggataagaatacccaggaggtgttcgcccaagttaagcagatctacaagaccccacccataaaggatttcggtggattcaattttagtcagatactcccagacccatctaagccatccaagaggagctttatcgaggatcttttgtttaacaaagttactctggccgacgccggtttcatcaagcagtacggagattgcctcggcgacatcgctgctcgtgacctcatctgtgcgcaaaagtttaacggtctgacggtgctgcctcccctccttactgatgaaatgatcgcccagtataccagcgcactcctcgctggcaccataacatccggttggacattcggcgctggtgcagcactgcagataccattcgccatgcaaatggcatatcgtttcaacggtatcggtgtcacacagaatgtcctatatgagaaccagaagctgatcgcaaatcagttcaatagtgccatcggaaaaatccaggatagccttagcagcacagcctcagcccttggcaaactccaggatgtcgtgaaccagaatgcccaggctctcaataccctcgtgaagcagctctcatctaatttcggcgcaatttccagtgtcctcaacgacatcctcagccgcctcgacccccccgaggccgaagtgcagattgacagactgattacaggtcgactccagagcctccagacttacgtgactcagcagctgataagagccgccgagataagggccagcgctaacctggctgccacaaagatgtctgagtgcgtgctgggccagtccaagagagtagacttctgtggcaaaggctaccatctgatgagcttcccacaatccgcacctcacggcgtagtgttcctccacgtgacatatgtaccggctcaggagaagaatttcactaccgctcctgctatatgccatgatggaaaggctcacttcccccgggagggggtgttcgtgtccaacggcacccattggtttgtgactcagcggaatttctacgaaccccagatcataaccactgacaacacatttgtgtccggaaattgtgacgtggtcattggaatagtgaacaacactgtttatgatccactgcagccagaacttgacagctttaaggaggagctcgacaagtacttcaagaatcatacgtcaccagatgtggacctcggagatattagcggtatcaatgccagtgttgtcaatattcagaaggaaatagaccgccttaatgaggtcgccaaaaatctgaacgagagcctcatcgatcttcaggagctgggcaaatatgagcagtacatcaagtggccttggtatcaaatactgtcaatttattcaacagtggcgagttccctagcactggcaatcatgatggctggtctatctttatggatgtgctccaatggatcgttacaatgcagaatttgcatttaa

SEQ ID NO: 27 - protein, 1262 aa, Artificial Sequence
  PDI-Modified SARS-CoV-2 S protein GSAS+PP H5iTM/CT-AA
MAKNVAIFGLLFSLLVLVPSQIFAVNLTTRTQLPPAYTNSFTRGVYYPDKVFRSSVLHSTQDLFLPFFSNVTWFHAIHVSGTNGTKRFDNPVLPFNDGVYFASTEKSNIIRGWIFGTTLDSKTQSLLIVNNATNVVIKVCEFQFCNDPFLGVYYHKNNKSWMESEFRVYSSANNCTFEYVSQPFLMDLEGKQGNFKNLREFVFKNIDGYFKIYSKHTPINLVRDLPQGFSALEPLVDLPIGINITRFQTLLALHRSYLTPGDSSSGWTAGAAAYYVGYLQPRTFLLKYNENGTITDAVDCALDPLSETKCTLKSFTVEKGIYQTSNFRVQPTESIVRFPNITNLCPFGEVFNATRFASVYAWNRKRISNCVADYSVLYNSASFSTFKCYGVSPTKLNDLCFTNVYADSFVIRGDEVRQIAPGQTGKIADYNYKLPDDFTGCVIAWNSNNLDSKVGGNYNYLYRLFRKSNLKPFERDISTEIYQAGSTPCNGVEGFNCYFPLQSYGFQPTNGVGYQPYRVVVLSFELLHAPATVCGPKKSTNLVKNKCVNFNFNGLTGTGVLTESNKKFLPFQQFGRDIADTTDAVRDPQTLEILDITPCSFGGVSVITPGTNTSNQVAVLYQDVNCTEVPVAIHADQLTPTWRVYSTGSNVFQTRAGCLIGAEHVNNSYECDIPIGAGICASYQTQTNSPGSASSVASQSIIAYTMSLGAENSVAYSNNSIAIPTNFTISVTTEILPVSMTKTSVDCTMYICGDSTECSNLLLQYGSFCTQLNRALTGIAVEQDKNTQEVFAQVKQIYKTPPIKDFGGFNFSQILPDPSKPSKRSFIEDLLFNKVTLADAGFIKQYGDCLGDIAARDLICAQKFNGLTVLPPLLTDEMIAQYTSALLAGTITSGWTFGAGAALQIPFAMQMAYRFNGIGVTQNVLYENQKLIANQFNSAIGKIQDSLSSTASALGKLQDVVNQNAQALNTLVKQLSSNFGAISSVLNDILSRLDPPEAEVQIDRLITGRLQSLQTYVTQQLIRAAEIRASANLAATKMSECVLGQSKRVDFCGKGYHLMSFPQSAPHGVVFLHVTYVPAQEKNFTTAPAICHDGKAHFPREGVFVSNGTHWFVTQRNFYEPQIITTDNTFVSGNCDVVIGIVNNTVYDPLQPELDSFKEELDKYFKNHTSPDVDLGDISGINASVVNIQKEIDRLNEVAKNLNESLIDLQELGKYEQYIKWPWYQILSIYSTVASSLALAIMMAGLSLWMCSNGSLQCRICI

SEQ ID NO: 28 - DNA, 48 bp, Artificial Sequence
  IF(Avb)-H5I.r
acgacacgactaaggcctttaaatgcaaattctgcattgtaacgatcc

SEQ ID NO: 29 - DNA, 3780 bp, Artificial Sequence
  PDI-Modified SARS-CoV-2 S protein GSAS+PP wtTM/H5iCT-DNA
atggcgaaaaacgttgcgattttcggcttattgttttctcttcttgtgttggttccttctcagatcttcgcggtgaatcttacgacgcgaacacagttaccacccgcatatacaaatagcttcactcggggtgtttattaccccgacaaagtgttcaggtcctccgtgctccactcaacacaggacctctttcttcctttcttttctaacgtgacatggtttcatgccattcatgtatccggcactaacggtactaagaggttcgataatcctgtgctccctttcaatgacggcgtttactttgcaagcacagagaagagtaacatcatccgaggttggatctttggcactaccctcgattcaaagacgcagagcctcctcattgtgaacaatgccactaacgtggtgatcaaagtttgcgagtttcagttctgcaatgaccctttcttgggggtgtactatcataagaacaacaagtcttggatggaatctgaattccgcgtctatagcagcgccaacaactgcacctttgaatacgtgtcccagcccttccttatggacctggagggaaagcagggaaactttaagaatctgagagagttcgtgtttaaaaatatcgacggctattttaagatctattctaagcacacgcctattaatctcgtgcgcgatcttccacaaggcttcagcgccctggaaccactcgtggacctcccaattggtatcaacatcactagatttcagactctgcttgccctccaccgatcctatctgacacccggagactcctctagcggctggactgccggcgctgccgcttattacgttggttatcttcagccacgcacgttcctgctgaagtataacgagaatggtactattaccgatgccgtggattgtgcccttgaccccctgtccgaaactaagtgcacactcaagtcattcactgtggaaaaaggaatctaccagacaagcaattttcgggtccagcctactgagagcattgtgcgctttcctaacatcacaaatctttgccccttcggagaggttttcaatgctacacggtttgcctccgtgtatgcctggaaccgcaagagaatttccaattgcgtggccgattactccgtgctctacaatagtgcaagctttagcacctttaagtgctatggcgtatcccctactaagcttaacgacttgtgtttcacaaacgtgtatgccgactcctttgtgatacggggcgacgaagttagacagatagcaccaggacagacgggaaagatagctgactacaactataagcttcctgatgacttcactggctgcgttatcgcgtggaattctaacaacctggactcaaaagtcggcggcaactataactatctctatcggctgttccgcaagagtaaccttaagccctttgagagagatataagcactgaaatctaccaggctggcagtacgccctgtaatggcgtggaaggctttaattgttattttccactgcaatcctatggttttcagccaaccaatggcgtgggctaccaaccataccgcgtcgtggtgctctcctttgaactgctccacgctcccgcgactgtctgcggccccaagaagtccacgaaccttgtgaagaataagtgcgttaattttaatttcaacggcctcactggaacaggagtgctcactgagagtaacaagaagttcctgccatttcaacaatttggcagagacatagccgatactactgacgccgttagggacccccagaccctcgagattctcgatataacgccctgctccttcggtggagtttccgtgatcacgccaggcaccaataccagtaaccaggtcgccgtgctgtatcaggatgtcaactgtactgaggtgcccgtagccatccatgcggatcagctcacaccaacttggagggtgtacagcaccggctccaatgtattccagactcgggccggatgccttattggcgccgaacacgtgaacaatagttacgaatgcgatattccaattggcgccggaatctgtgctagctaccagactcagacgaactccccaggcagcgccagcagcgttgccagccagtcaatcatcgcttatacaatgtcacttggagccgaaaactccgtggcttactcaaacaacagcatcgccatccccacaaacttcaccatatccgtgacaactgagattctgccagtgtccatgactaagacgtccgtagattgcactatgtacatatgcggcgacagcacagaatgttctaatctgctgctgcaatatggaagcttctgcactcaactgaacagagcgctcacaggcatcgccgtggagcaggataagaatacccaggaggtgttcgcccaagttaagcagatctacaagaccccacccataaaggatttcggtggattcaattttagtcagatactcccagacccatctaagccatccaagaggagctttatcgaggatcttttgtttaacaaagttactctggccgacgccggtttcatcaagcagtacggagattgcctcggcgacatcgctgctcgtgacctcatctgtgcgcaaaagtttaacggtctgacggtgctgcctcccctccttactgatgaaatgatcgcccagtataccagcgcactcctcgctggcaccataacatccggttggacattcggcgctggtgcagcactgcagataccattcgccatgcaaatggcatatcgtttcaacggtatcggtgtcacacagaatgtcctatatgagaaccagaagctgatcgcaaatcagttcaatagtgccatcggaaaaatccaggatagccttagcagcacagcctcagcccttggcaaactccaggatgtcgtgaaccagaatgcccaggctctcaataccctcgtgaagcagctctcatctaatttcggcgcaatttccagtgtcctcaacgacatcctcagccgcctcgacccccccgaggccgaagtgcagattgacagactgattacaggtcgactccagagcctccagacttacgtgactcagcagctgataagagccgccgagataagggccagcgctaacctggctgccacaaagatgtctgagtgcgtgctgggccagtccaagagagtagacttctgtggcaaaggctaccatctgatgagcttcccacaatccgcacctcacggcgtagtgttcctccacgtgacatatgtaccggctcaggagaagaatttcactaccgctcctgctatatgccatgatggaaaggctcacttcccccgggagggggtgttcgtgtccaacggcacccattggtttgtgactcagcggaatttctacgaaccccagatcataaccactgacaacacatttgtgtccggaaattgtgacgtggtcattggaatagtgaacaacactgtttatgatccactgcagccagaacttgacagctttaaggaggagctcgacaagtacttcaagaatcatacgtcaccagatgtggacctcggagatattagcggtatcaatgccagtgttgtcaatattcagaaggaaatagaccgccttaatgaggtcgccaaaaatctgaacgagagcctcatcgatcttcaggagctgggcaaatatgagcagtacatcaagtggccttggtatatttggcttggcttcatcgccggcctgatcgccatagtaatggtcacaattatgctctctttatggatgtgctccaatggatcgttacaatgcagaatttgcatttaa

SEQ ID NO: 30 - protein, 1259 aa, Artificial Sequence
  PDI-Modified SARS-CoV-2 S protein GSAS+PP wtTM/H5iCT-AA
MAKNVAIFGLLFSLLVLVPSQIFAVNLTTRTQLPPAYTNSFTRGVYYPDKVFRSSVLHSTQDLFLPFFSNVTWFHAIHVSGTNGTKRFDNPVLPFNDGVYFASTEKSNIIRGWIFGTTLDSKTQSLLIVNNATNVVIKVCEFQFCNDPFLGVYYHKNNKSWMESEFRVYSSANNCTFEYVSQPFLMDLEGKQGNFKNLREFVFKNIDGYFKIYSKHTPINLVRDLPQGFSALEPLVDLPIGINITRFQTLLALHRSYLTPGDSSSGWTAGAAAYYVGYLQPRTFLLKYNENGTITDAVDCALDPLSETKCTLKSFTVEKGIYQTSNFRVQPTESIVRFPNITNLCPFGEVFNATRFASVYAWNRKRISNCVADYSVLYNSASFSTFKCYGVSPTKLNDLCFTNVYADSFVIRGDEVRQIAPGQTGKIADYNYKLPDDFTGCVIAWNSNNLDSKVGGNYNYLYRLFRKSNLKPFERDISTEIYQAGSTPCNGVEGFNCYFPLQSYGFQPTNGVGYQPYRVVVLSFELLHAPATVCGPKKSTNLVKNKCVNFNFNGLTGTGVLTESNKKFLPFQQFGRDIADTTDAVRDPQTLEILDITPCSFGGVSVITPGTNTSNQVAVLYQDVNCTEVPVAIHADQLTPTWRVYSTGSNVFQTRAGCLIGAEHVNNSYECDIPIGAGICASYQTQTNSPGSASSVASQSIIAYTMSLGAENSVAYSNNSIAIPTNFTISVTTEILPVSMTKTSVDCTMYICGDSTECSNLLLQYGSFCTQLNRALTGIAVEQDKNTQEVFAQVKQIYKTPPIKDFGGFNFSQILPDPSKPSKRSFIEDLLFNKVTLADAGFIKQYGDCLGDIAARDLICAQKFNGLTVLPPLLTDEMIAQYTSALLAGTITSGWTFGAGAALQIPFAMQMAYRFNGIGVTQNVLYENQKLIANQFNSAIGKIQDSLSSTASALGKLQDVVNQNAQALNTLVKQLSSNFGAISSVLNDILSRLDPPEAEVQIDRLITGRLQSLQTYVTQQLIRAAEIRASANLAATKMSECVLGQSKRVDFCGKGYHLMSFPQSAPHGVVFLHVTYVPAQEKNFTTAPAICHDGKAHFPREGVFVSNGTHWFVTQRNFYEPQIITTDNTFVSGNCDVVIGIVNNTVYDPLQPELDSFKEELDKYFKNHTSPDVDLGDISGINASVVNIQKEIDRLNEVAKNLNESLIDLQELGKYEQYIKWPWYIWLGFIAGLIAIVMVTIMLSLWMCSNGSLQCRICI

SEQ ID NO: 31 - DNA, 4474 bp, Artificial Sequence
  Cloning vector 8501 from left to right T-DNA
tggcaggatatattgtggtgtaaacaaattgacgcttagacaacttaataacacattgcggacgtttttaatgtactgaattaacgccgaatcccgggctggtatatttatatgttgtcaaataactcaaaaaccataaaagtttaagttagcaagtgtgtacatttttacttgaacaaaaatattcacctactactgttataaatcattattaaacattagagtaaagaaatatggatgataagaacaagagtagtgatattttgacaacaattttgttgcaacatttgagaaaattttgttgttctctcttttcattggtcaaaaacaatagagagagaaaaaggaagagggagaataaaaacataatgtgagtatgagagagaaagttgtacaaaagttgtaccaaaatagttgtacaaatatcattgaggaatttgacaaaagctacacaaataagggttaattgctgtaaataaataaggatgacgcattagagagatgtaccattagagaatttttggcaagtcattaaaaagaaagaataaattatttttaaaattaaaagttgagtcatttgattaaacatgtgattatttaatgaattgatgaaagagttggattaaagttgtattagtaattagaatttggtgtcaaatttaatttgacatttgatcttttcctatatattgccccatagagtcagttaactcatttttatatttcatagatcaaataagagaaataacggtatattaatccctccaaaaaaaaaaaacggtatatttactaaaaaatctaagccacgtaggaggataacaggatccccgtaggaggataacatccaatccaaccaatcacaacaatcctgatgagataacccactttaagcccacgcatctgtggcacatctacattatctaaatcacacattcttccacacatctgagccacacaaaaaccaatccacatctttatcacccattctataaaaaatcacactttgtgagtctacactttgattcccttcaaacacatacaaagagaagagactaattaattaattaatcatcttgagagaaaatggaacgagctatacaaggaaacgacgctagggaacaagctaacagtgaacgttgggatggaggatcaggaggtaccacttctcccttcaaacttcctgacgaaagtccgagttggactgagtggcggctacataacgatgagacgaattcgaatcaagataatccccttggtttcaaggaaagctggggtttcgggaaagttgtatttaagagatatctcagatacgacaggacggaagcttcactgcacagagtccttggatcttggacgggagattcggttaactatgcagcatctcgatttttcggtttcgaccagatcggatgtacctatagtattcggtttcgaggagttagtatcaccgtttctggagggtcgcgaactcttcagcatctctgtgagatggcaattcggtctaagcaagaactgctacagcttgccccaatcgaagtggaaagtaatgtatcaagaggatgccctgaaggtactcaaaccttcgaaaaagaaagcgagtaagttaaaatgcttcttcgtctcctatttataatatggtttgttattgttaattttgttcttgtagaagagcttaattaatcgttgttgttatgaaatactatttgtatgagatgaactggtgtaatgtaattcatttacataagtggagtcagaatcagaatgtttcctccataactaactagacatgaagacctgccgcgtacaattgtcttatatttgaacaactaaaattgaacatcttttgccacaactttataagtggttaatatagctcaaatatatggtcaagttcaatagattaataatggaaatatcagttatcgaaattcattaacaatcaacttaacgttattaactactaattttatatcatcccctttgataaatgatagtacaccaattaggaaggagcatgctcgcctaggagattgtcgtttcccgccttcagtttgcaagctgctctagccgtgtagccaatacgcaaaccgcctctccccgcgcgttgggaattactagcgcgtgtcgacaagcttgcatgccggtcaacatggtggagcacgacacacttgtctactccaaaaatatcaaagatacagtctcagaagaccaaagggcaattgagacttttcaacaaagggtaatatccggaaacctcctcggattccattgcccagctatctgtcactttattgtgaagatagtggaaaaggaaggtggctcctacaaatgccatcattgcgataaaggaaaggccatcgttgaagatgcctctgccgacagtggtcccaaagatggacccccacccacgaggagcatcgtggaaaaagaagacgttccaaccacgtcttcaaagcaagtggattgatgtgataacatggtggagcacgacacacttgtctactccaaaaatatcaaagatacagtctcagaagaccaaagggcaattgagacttttcaacaaagggtaatatccggaaacctcctcggattccattgcccagctatctgtcactttattgtgaagatagtggaaaaggaaggtggctcctacaaatgccatcattgcgataaaggaaaggccatcgttgaagatgcctctgccgacagtggtcccaaagatggacccccacccacgaggagcatcgtggaaaaagaagacgttccaaccacgtcttcaaagcaagtggattgatgtgatatctccactgacgtaagggatgacgcacaatcccactatccttcgcaagacccttcctctatataaggaagttcatttcatttggagaggcacacaatttgctttagtgattaaactttcttttacaacaaattaaaggtctattatctcccaacaacataagaaaacaatggcgaaaaacgttgcgattttcggcttattgttttctcttcttgtgttggttccttctcagatcttcgcgacgtcactcctcagccaaaacgacacccccatctgtctatccactggcccctggatctgctgcccaaactaactccatggtgaccctgggatgcctggtcaagggctatttccctgagccagtgacagtgacctggaactctggatccctgtccagcggtgtgcacaccttcccagctgtcctgcagtctgacctctacactctgagcagctcagtgactgtcccctccagcacctggcccagcgagaccgtcacctgcaacgttgcccacccggccagcagcaccaaggtggacaagaaaattgtgcccagggattgtggttgtaagccttgcatatgtacagtcccagaagtatcatctgtcttcatcttccccccaaagcccaaggatgtgctcaccattactctgactcctaaggtcacgtgtgttgtggtagacatcagcaaggatgatcccgaggtccagttcagctggtttgtagatgatgtggaggtgcacacagctcagacgcaaccccgggaggagcagttcaacagcactttccgctcagtcagtgaacttcccatcatgcaccaggactggctcaatggcaaggagacgtccagattttggcgatctattcaactgtcgccagttcattggtactggtagtctccctgggggcaatcagtttctggatgtgctctaatgggtctctacagtgtagaatatgtatttaaaggccttagtcgtgtcgtttttcaaataatataatccttttagggttttagttagtttaaattttctgttgctcctgtttagcaggtcgtgccttcagcaagcacacaaaaacagagtgtttattttaagttgtttgtttagtgattcaaaaaaaaaatcgttcaaacatttggcaataaagtttcttaagattgaatcctgttgccggtcttgcgatgattatcatataatttctgttgaattacgttaagcatgtaataattaacatgtaatgcatgacgttatttatgagatgggtttttatgattagagtcccgcaattatacatttaatacgcgatagaaaacaaaatatagcgcgcaaactaggataaattatcgcgcgcggtgtcatctatgttactagatctctagagtctcaagcttggcgcgcccacgtgactagtggcactggccgtcgttttacaacgtcgtgactgggaaaaccctggcgttacccaacttaatcgccttgcagcacatccccctttcgccagctggcgtaatagcgaagaggcccgcaccgatcgcccttcccaacagttgcgcagcctgaatggcgaatgctagagcagcttgagcttggatcagattgtcgtttcccgccttcagtttaaactatcagtgtttgacaggatatattggcgggtaaacctaagagaaaagagcgttta

SEQ ID NO: 32 - DNA, 5083 bp, Artificial Sequence
  Construct 8586 from 2X35S prom to NOS term
gtcaacatggtggagcacgacacacttgtctactccaaaaatatcaaagatacagtctcagaagaccaaagggcaattgagacttttcaacaaagggtaatatccggaaacctcctcggattccattgcccagctatctgtcactttattgtgaagatagtggaaaaggaaggtggctcctacaaatgccatcattgcgataaaggaaaggccatcgttgaagatgcctctgccgacagtggtcccaaagatggacccccacccacgaggagcatcgtggaaaaagaagacgttccaaccacgtcttcaaagcaagtggattgatgtgataacatggtggagcacgacacacttgtctactccaaaaatatcaaagatacagtctcagaagaccaaagggcaattgagacttttcaacaaagggtaatatccggaaacctcctcggattccattgcccagctatctgtcactttattgtgaagatagtggaaaaggaaggtggctcctacaaatgccatcattgcgataaaggaaaggccatcgttgaagatgcctctgccgacagtggtcccaaagatggacccccacccacgaggagcatcgtggaaaaagaagacgttccaaccacgtcttcaaagcaagtggattgatgtgatatctccactgacgtaagggatgacgcacaatcccactatccttcgcaagacccttcctctatataaggaagttcatttcatttggagaggcacacaatttgctttagtgattaaactttcttttacaacaaattaaaggtctattatctcccaacaacataagaaaacaatggcgaaaaacgttgcgattttcggcttattgttttctcttcttgtgttggttccttctcagatcttcgcggtgaatcttacgacgcgaacacagttaccacccgcatatacaaatagcttcactcggggtgtttattaccccgacaaagtgttcaggtcctccgtgctccactcaacacaggacctctttcttcctttcttttctaacgtgacatggtttcatgccattcatgtatccggcactaacggtactaagaggttcgataatcctgtgctccctttcaatgacggcgtttactttgcaagcacagagaagagtaacatcatccgaggttggatctttggcactaccctcgattcaaagacgcagagcctcctcattgtgaacaatgccactaacgtggtgatcaaagtttgcgagtttcagttctgcaatgaccctttcttgggggtgtactatcataagaacaacaagtcttggatggaatctgaattccgcgtctatagcagcgccaacaactgcacctttgaatacgtgtcccagcccttccttatggacctggagggaaagcagggaaactttaagaatctgagagagttcgtgtttaaaaatatcgacggctattttaagatctattctaagcacacgcctattaatctcgtgcgcgatcttccacaaggcttcagcgccctggaaccactcgtggacctcccaattggtatcaacatcactagatttcagactctgcttgccctccaccgatcctatctgacacccggagactcctctagcggctggactgccggcgctgccgcttattacgttggttatcttcagccacgcacgttcctgctgaagtataacgagaatggtactattaccgatgccgtggattgtgcccttgaccccctgtccgaaactaagtgcacactcaagtcattcactgtggaaaaaggaatctaccagacaagcaattttcgggtccagcctactgagagcattgtgcgctttcctaacatcacaaatctttgccccttcggagaggttttcaatgctacacggtttgcctccgtgtatgcctggaaccgcaagagaatttccaattgcgtggccgattactccgtgctctacaatagtgcaagctttagcacctttaagtgctatggcgtatcccctactaagcttaacgacttgtgtttcacaaacgtgtatgccgactcctttgtgatacggggcgacgaagttagacagatagcaccaggacagacgggaaagatagctgactacaactataagcttcctgatgacttcactggctgcgttatcgcgtggaattctaacaacctggactcaaaagtcggcggcaactataactatctctatcggctgttccgcaagagtaaccttaagccctttgagagagatataagcactgaaatctaccaggctggcagtacgccctgtaatggcgtggaaggctttaattgttattttccactgcaatcctatggttttcagccaaccaatggcgtgggctaccaaccataccgcgtcgtggtgctctcctttgaactgctccacgctcccgcgactgtctgcggccccaagaagtccacgaaccttgtgaagaataagtgcgttaattttaatttcaacggcctcactggaacaggagtgctcactgagagtaacaagaagttcctgccatttcaacaatttggcagagacatagccgatactactgacgccgttagggacccccagaccctcgagattctcgatataacgccctgctccttcggtggagtttccgtgatcacgccaggcaccaataccagtaaccaggtcgccgtgctgtatcaggatgtcaactgtactgaggtgcccgtagccatccatgcggatcagctcacaccaacttggagggtgtacagcaccggctccaatgtattccagactcgggccggatgccttattggcgccgaacacgtgaacaatagttacgaatgcgatattccaattggcgccggaatctgtgctagctaccagactcagacgaactccccaggcagcgccagcagcgttgccagccagtcaatcatcgcttatacaatgtcacttggagccgaaaactccgtggcttactcaaacaacagcatcgccatccccacaaacttcaccatatccgtgacaactgagattctgccagtgtccatgactaagacgtccgtagattgcactatgtacatatgcggcgacagcacagaatgttctaatctgctgctgcaatatggaagcttctgcactcaactgaacagagcgctcacaggcatcgccgtggagcaggataagaatacccaggaggtgttcgcccaagttaagcagatctacaagaccccacccataaaggatttcggtggattcaattttagtcagatactcccagacccatctaagccatccaagaggagctttatcgaggatcttttgtttaacaaagttactctggccgacgccggtttcatcaagcagtacggagattgcctcggcgacatcgctgctcgtgacctcatctgtgcgcaaaagtttaacggtctgacggtgctgcctcccctccttactgatgaaatgatcgcccagtataccagcgcactcctcgctggcaccataacatccggttggacattcggcgctggtgcagcactgcagataccattcgccatgcaaatggcatatcgtttcaacggtatcggtgtcacacagaatgtcctatatgagaaccagaagctgatcgcaaatcagttcaatagtgccatcggaaaaatccaggatagccttagcagcacagcctcagcccttggcaaactccaggatgtcgtgaaccagaatgcccaggctctcaataccctcgtgaagcagctctcatctaatttcggcgcaatttccagtgtcctcaacgacatcctcagccgcctcgacccccccgaggccgaagtgcagattgacagactgattacaggtcgactccagagcctccagacttacgtgactcagcagctgataagagccgccgagataagggccagcgctaacctggctgccacaaagatgtctgagtgcgtgctgggccagtccaagagagtagacttctgtggcaaaggctaccatctgatgagcttcccacaatccgcacctcacggcgtagtgttcctccacgtgacatatgtaccggctcaggagaagaatttcactaccgctcctgctatatgccatgatggaaaggctcacttcccccgggagggggtgttcgtgtccaacggcacccattggtttgtgactcagcggaatttctacgaaccccagatcataaccactgacaacacatttgtgtccggaaattgtgacgtggtcattggaatagtgaacaacactgtttatgatccactgcagccagaacttgacagctttaaggaggagctcgacaagtacttcaagaatcatacgtcaccagatgtggacctcggagatattagcggtatcaatgccagtgttgtcaatattcagaaggaaatagaccgccttaatgaggtcgccaaaaatctgaacgagagcctcatcgatcttcaggagctgggcaaatatgagcagtacatcaagtggccttggtatatttggcttggcttcatcgccggcctgatcgccatagtaatggtcacaattatgctctgctgcatgacctcttgctgctcctgtctgaaaggctgctgctcttgcggatcctgctgcaaatttgatgaggatgacagtgaaccagtcctgaagggcgtgaagctgcactatacttagaggccttagtcgtgtcgtttttcaaataatataatccttttagggttttagttagtttaaattttctgttgctcctgtttagcaggtcgtgccttcagcaagcacacaaaaacagagtgtttattttaagttgtttgtttagtgattcaaaaaaaaaatcgttcaaacatttggcaataaagtttcttaagattgaatcctgttgccggtcttgcgatgattatcatataatttctgttgaattacgttaagcatgtaataattaacatgtaatgcatgacgttatttatgagatgggtttttatgattagagtcccgcaattatacatttaatacgcgatagaaaacaaaatatagcgcgcaaactaggataaattatcgcgcgcggtgtcatctatgttactagat

SEQ ID NO: 33 - DNA, 4461 bp, Artificial Sequence
  Cloning vector 8500 from left to right T-DNA
tggcaggatatattgtggtgtaaacaaattgacgcttagacaacttaataacacattgcggacgtttttaatgtactgaattaacgccgaatcccgggctggtatatttatatgttgtcaaataactcaaaaaccataaaagtttaagttagcaagtgtgtacatttttacttgaacaaaaatattcacctactactgttataaatcattattaaacattagagtaaagaaatatggatgataagaacaagagtagtgatattttgacaacaattttgttgcaacatttgagaaaattttgttgttctctcttttcattggtcaaaaacaatagagagagaaaaaggaagagggagaataaaaacataatgtgagtatgagagagaaagttgtacaaaagttgtaccaaaatagttgtacaaatatcattgaggaatttgacaaaagctacacaaataagggttaattgctgtaaataaataaggatgacgcattagagagatgtaccattagagaatttttggcaagtcattaaaaagaaagaataaattatttttaaaattaaaagttgagtcatttgattaaacatgtgattatttaatgaattgatgaaagagttggattaaagttgtattagtaattagaatttggtgtcaaatttaatttgacatttgatcttttcctatatattgccccatagagtcagttaactcatttttatatttcatagatcaaataagagaaataacggtatattaatccctccaaaaaaaaaaaacggtatatttactaaaaaatctaagccacgtaggaggataacaggatccccgtaggaggataacatccaatccaaccaatcacaacaatcctgatgagataacccactttaagcccacgcatctgtggcacatctacattatctaaatcacacattcttccacacatctgagccacacaaaaaccaatccacatctttatcacccattctataaaaaatcacactttgtgagtctacactttgattcccttcaaacacatacaaagagaagagactaattaattaattaatcatcttgagagaaaatggaacgagctatacaaggaaacgacgctagggaacaagctaacagtgaacgttgggatggaggatcaggaggtaccacttctcccttcaaacttcctgacgaaagtccgagttggactgagtggcggctacataacgatgagacgaattcgaatcaagataatccccttggtttcaaggaaagctggggtttcgggaaagttgtatttaagagatatctcagatacgacaggacggaagcttcactgcacagagtccttggatcttggacgggagattcggttaactatgcagcatctcgatttttcggtttcgaccagatcggatgtacctatagtattcggtttcgaggagttagtatcaccgtttctggagggtcgcgaactcttcagcatctctgtgagatggcaattcggtctaagcaagaactgctacagcttgccccaatcgaagtggaaagtaatgtatcaagaggatgccctgaaggtactcaaaccttcgaaaaagaaagcgagtaagttaaaatgcttcttcgtctcctatttataatatggtttgttattgttaattttgttcttgtagaagagcttaattaatcgttgttgttatgaaatactatttgtatgagatgaactggtgtaatgtaattcatttacataagtggagtcagaatcagaatgtttcctccataactaactagacatgaagacctgccgcgtacaattgtcttatatttgaacaactaaaattgaacatcttttgccacaactttataagtggttaatatagctcaaatatatggtcaagttcaatagattaataatggaaatatcagttatcgaaattcattaacaatcaacttaacgttattaactactaattttatatcatcccctttgataaatgatagtacaccaattaggaaggagcatgctcgcctaggagattgtcgtttcccgccttcagtttgcaagctgctctagccgtgtagccaatacgcaaaccgcctctccccgcgcgttgggaattactagcgcgtgtcgacaagcttgcatgccggtcaacatggtggagcacgacacacttgtctactccaaaaatatcaaagatacagtctcagaagaccaaagggcaattgagacttttcaacaaagggtaatatccggaaacctcctcggattccattgcccagctatctgtcactttattgtgaagatagtggaaaaggaaggtggctcctacaaatgccatcattgcgataaaggaaaggccatcgttgaagatgcctctgccgacagtggtcccaaagatggacccccacccacgaggagcatcgtggaaaaagaagacgttccaaccacgtcttcaaagcaagtggattgatgtgataacatggtggagcacgacacacttgtctactccaaaaatatcaaagatacagtctcagaagaccaaagggcaattgagacttttcaacaaagggtaatatccggaaacctcctcggattccattgcccagctatctgtcactttattgtgaagatagtggaaaaggaaggtggctcctacaaatgccatcattgcgataaaggaaaggccatcgttgaagatgcctctgccgacagtggtcccaaagatggacccccacccacgaggagcatcgtggaaaaagaagacgttccaaccacgtcttcaaagcaagtggattgatgtgatatctccactgacgtaagggatgacgcacaatcccactatccttcgcaagacccttcctctatataaggaagttcatttcatttggagaggcacttttctaatcaatcatcaaacagaacgcagaaaatttcctaaaaacaaaaaaaaggcatacaaatggcgaaaaacgttgcgattttcggcttattgttttctcttcttgtgttggttccttctcagatcttcgcgacgtcactcctcagccaaaacgacacccccatctgtctatccactggcccctggatctgctgcccaaactaactccatggtgaccctgggatgcctggtcaagggctatttccctgagccagtgacagtgacctggaactctggatccctgtccagcggtgtgcacaccttcccagctgtcctgcagtctgacctctacactctgagcagctcagtgactgtcccctccagcacctggcccagcgagaccgtcacctgcaacgttgcccacccggccagcagcaccaaggtggacaagaaaattgtgcccagggattgtggttgtaagccttgcatatgtacagtcccagaagtatcatctgtcttcatcttccccccaaagcccaaggatgtgctcaccattactctgactcctaaggtcacgtgtgttgtggtagacatcagcaaggatgatcccgaggtccagttcagctggtttgtagatgatgtggaggtgcacacagctcagacgcaaccccgggaggagcagttcaacagcactttccgctcagtcagtgaacttcccatcatgcaccaggactggctcaatggcaaggagacgtccagattttggcgatctattcaactgtcgccagttcattggtactggtagtctccctgggggcaatcagtttctggatgtgctctaatgggtctctacagtgtagaatatgtatttaaaggccttagtcgtgtcgtttttcaaataatataatccttttagggttttagttagtttaaattttctgttgctcctgtttagcaggtcgtgccttcagcaagcacacaaaaacagagtgtttattttaagttgtttgtttagtgattcaaaaaaaaaatcgttcaaacatttggcaataaagtttcttaagattgaatcctgttgccggtcttgcgatgattatcatataatttctgttgaattacgttaagcatgtaataattaacatgtaatgcatgacgttatttatgagatgggtttttatgattagagtcccgcaattatacatttaatacgcgatagaaaacaaaatatagcgcgcaaactaggataaattatcgcgcgcggtgtcatctatgttactagatctctagagtctcaagcttggcgcgcccacgtgactagtggcactggccgtcgttttacaacgtcgtgactgggaaaaccctggcgttacccaacttaatcgccttgcagcacatccccctttcgccagctggcgtaatagcgaagaggcccgcaccgatcgcccttcccaacagttgcgcagcctgaatggcgaatgctagagcagcttgagcttggatcagattgtcgtttcccgccttcagtttaaactatcagtgtttgacaggatatattggcgggtaaacctaagagaaaagagcgttta

SEQ ID NO: 34 - DNA, 5070 bp, Artificial Sequence
  Construct 8589 from 2X35S prom to NOS term
gtcaacatggtggagcacgacacacttgtctactccaaaaatatcaaagatacagtctcagaagaccaaagggcaattgagacttttcaacaaagggtaatatccggaaacctcctcggattccattgcccagctatctgtcactttattgtgaagatagtggaaaaggaaggtggctcctacaaatgccatcattgcgataaaggaaaggccatcgttgaagatgcctctgccgacagtggtcccaaagatggacccccacccacgaggagcatcgtggaaaaagaagacgttccaaccacgtcttcaaagcaagtggattgatgtgataacatggtggagcacgacacacttgtctactccaaaaatatcaaagatacagtctcagaagaccaaagggcaattgagacttttcaacaaagggtaatatccggaaacctcctcggattccattgcccagctatctgtcactttattgtgaagatagtggaaaaggaaggtggctcctacaaatgccatcattgcgataaaggaaaggccatcgttgaagatgcctctgccgacagtggtcccaaagatggacccccacccacgaggagcatcgtggaaaaagaagacgttccaaccacgtcttcaaagcaagtggattgatgtgatatctccactgacgtaagggatgacgcacaatcccactatccttcgcaagacccttcctctatataaggaagttcatttcatttggagaggcacttttctaatcaatcatcaaacagaacgcagaaaatttcctaaaaacaaaaaaaaggcatacaaatggcgaaaaacgttgcgattttcggcttattgttttctcttcttgtgttggttccttctcagatcttcgcggtgaatcttacgacgcgaacacagttaccacccgcatatacaaatagcttcactcggggtgtttattaccccgacaaagtgttcaggtcctccgtgctccactcaacacaggacctctttcttcctttcttttctaacgtgacatggtttcatgccattcatgtatccggcactaacggtactaagaggttcgataatcctgtgctccctttcaatgacggcgtttactttgcaagcacagagaagagtaacatcatccgaggttggatctttggcactaccctcgattcaaagacgcagagcctcctcattgtgaacaatgccactaacgtggtgatcaaagtttgcgagtttcagttctgcaatgaccctttcttgggggtgtactatcataagaacaacaagtcttggatggaatctgaattccgcgtctatagcagcgccaacaactgcacctttgaatacgtgtcccagcccttccttatggacctggagggaaagcagggaaactttaagaatctgagagagttcgtgtttaaaaatatcgacggctattttaagatctattctaagcacacgcctattaatctcgtgcgcgatcttccacaaggcttcagcgccctggaaccactcgtggacctcccaattggtatcaacatcactagatttcagactctgcttgccctccaccgatcctatctgacacccggagactcctctagcggctggactgccggcgctgccgcttattacgttggttatcttcagccacgcacgttcctgctgaagtataacgagaatggtactattaccgatgccgtggattgtgcccttgaccccctgtccgaaactaagtgcacactcaagtcattcactgtggaaaaaggaatctaccagacaagcaattttcgggtccagcctactgagagcattgtgcgctttcctaacatcacaaatctttgccccttcggagaggttttcaatgctacacggtttgcctccgtgtatgcctggaaccgcaagagaatttccaattgcgtggccgattactccgtgctctacaatagtgcaagctttagcacctttaagtgctatggcgtatcccctactaagcttaacgacttgtgtttcacaaacgtgtatgccgactcctttgtgatacggggcgacgaagttagacagatagcaccaggacagacgggaaagatagctgactacaactataagcttcctgatgacttcactggctgcgttatcgcgtggaattctaacaacctggactcaaaagtcggcggcaactataactatctctatcggctgttccgcaagagtaaccttaagccctttgagagagatataagcactgaaatctaccaggctggcagtacgccctgtaatggcgtggaaggctttaattgttattttccactgcaatcctatggttttcagccaaccaatggcgtgggctaccaaccataccgcgtcgtggtgctctcctttgaactgctccacgctcccgcgactgtctgcggccccaagaagtccacgaaccttgtgaagaataagtgcgttaattttaatttcaacggcctcactggaacaggagtgctcactgagagtaacaagaagttcctgccatttcaacaatttggcagagacatagccgatactactgacgccgttagggacccccagaccctcgagattctcgatataacgccctgctccttcggtggagtttccgtgatcacgccaggcaccaataccagtaaccaggtcgccgtgctgtatcaggatgtcaactgtactgaggtgcccgtagccatccatgcggatcagctcacaccaacttggagggtgtacagcaccggctccaatgtattccagactcgggccggatgccttattggcgccgaacacgtgaacaatagttacgaatgcgatattccaattggcgccggaatctgtgctagctaccagactcagacgaactccccaggcagcgccagcagcgttgccagccagtcaatcatcgcttatacaatgtcacttggagccgaaaactccgtggcttactcaaacaacagcatcgccatccccacaaacttcaccatatccgtgacaactgagattctgccagtgtccatgactaagacgtccgtagattgcactatgtacatatgcggcgacagcacagaatgttctaatctgctgctgcaatatggaagcttctgcactcaactgaacagagcgctcacaggcatcgccgtggagcaggataagaatacccaggaggtgttcgcccaagttaagcagatctacaagaccccacccataaaggatttcggtggattcaattttagtcagatactcccagacccatctaagccatccaagaggagctttatcgaggatcttttgtttaacaaagttactctggccgacgccggtttcatcaagcagtacggagattgcctcggcgacatcgctgctcgtgacctcatctgtgcgcaaaagtttaacggtctgacggtgctgcctcccctccttactgatgaaatgatcgcccagtataccagcgcactcctcgctggcaccataacatccggttggacattcggcgctggtgcagcactgcagataccattcgccatgcaaatggcatatcgtttcaacggtatcggtgtcacacagaatgtcctatatgagaaccagaagctgatcgcaaatcagttcaatagtgccatcggaaaaatccaggatagccttagcagcacagcctcagcccttggcaaactccaggatgtcgtgaaccagaatgcccaggctctcaataccctcgtgaagcagctctcatctaatttcggcgcaatttccagtgtcctcaacgacatcctcagccgcctcgacccccccgaggccgaagtgcagattgacagactgattacaggtcgactccagagcctccagacttacgtgactcagcagctgataagagccgccgagataagggccagcgctaacctggctgccacaaagatgtctgagtgcgtgctgggccagtccaagagagtagacttctgtggcaaaggctaccatctgatgagcttcccacaatccgcacctcacggcgtagtgttcctccacgtgacatatgtaccggctcaggagaagaatttcactaccgctcctgctatatgccatgatggaaaggctcacttcccccgggagggggtgttcgtgtccaacggcacccattggtttgtgactcagcggaatttctacgaaccccagatcataaccactgacaacacatttgtgtccggaaattgtgacgtggtcattggaatagtgaacaacactgtttatgatccactgcagccagaacttgacagctttaaggaggagctcgacaagtacttcaagaatcatacgtcaccagatgtggacctcggagatattagcggtatcaatgccagtgttgtcaatattcagaaggaaatagaccgccttaatgaggtcgccaaaaatctgaacgagagcctcatcgatcttcaggagctgggcaaatatgagcagtacatcaagtggccttggtatatttggcttggcttcatcgccggcctgatcgccatagtaatggtcacaattatgctctgctgcatgacctcttgctgctcctgtctgaaaggctgctgctcttgcggatcctgctgcaaatttgatgaggatgacagtgaaccagtcctgaagggcgtgaagctgcactatacttagaggccttagtcgtgtcgtttttcaaataatataatccttttagggttttagttagtttaaattttctgttgctcctgtttagcaggtcgtgccttcagcaagcacacaaaaacagagtgtttattttaagttgtttgtttagtgattcaaaaaaaaaatcgttcaaacatttggcaataaagtttcttaagattgaatcctgttgccggtcttgcgatgattatcatataatttctgttgaattacgttaagcatgtaataattaacatgtaatgcatgacgttatttatgagatgggtttttatgattagagtcccgcaattatacatttaatacgcgatagaaaacaaaatatagcgcgcaaactaggataaattatcgcgcgcggtgtcatctatgttactagat

SEQ ID NO: 35 - DNA, 4436 bp, Artificial Sequence
  Cloning vector 8716 from left to right T-DNA
tggcaggatatattgtggtgtaaacaaattgacgcttagacaacttaataacacattgcggacgtttttaatgtactgaattaacgccgaatcccgggctggtatatttatatgttgtcaaataactcaaaaaccataaaagtttaagttagcaagtgtgtacatttttacttgaacaaaaatattcacctactactgttataaatcattattaaacattagagtaaagaaatatggatgataagaacaagagtagtgatattttgacaacaattttgttgcaacatttgagaaaattttgttgttctctcttttcattggtcaaaaacaatagagagagaaaaaggaagagggagaataaaaacataatgtgagtatgagagagaaagttgtacaaaagttgtaccaaaatagttgtacaaatatcattgaggaatttgacaaaagctacacaaataagggttaattgctgtaaataaataaggatgacgcattagagagatgtaccattagagaatttttggcaagtcattaaaaagaaagaataaattatttttaaaattaaaagttgagtcatttgattaaacatgtgattatttaatgaattgatgaaagagttggattaaagttgtattagtaattagaatttggtgtcaaatttaatttgacatttgatcttttcctatatattgccccatagagtcagttaactcatttttatatttcatagatcaaataagagaaataacggtatattaatccctccaaaaaaaaaaaacggtatatttactaaaaaatctaagccacgtaggaggataacaggatccccgtaggaggataacatccaatccaaccaatcacaacaatcctgatgagataacccactttaagcccacgcatctgtggcacatctacattatctaaatcacacattcttccacacatctgagccacacaaaaaccaatccacatctttatcacccattctataaaaaatcacactttgtgagtctacactttgattcccttcaaacacatacaaagagaagagactaattaattaattaatcatcttgagagaaaatggaacgagctatacaaggaaacgacgctagggaacaagctaacagtgaacgttgggatggaggatcaggaggtaccacttctcccttcaaacttcctgacgaaagtccgagttggactgagtggcggctacataacgatgagacgaattcgaatcaagataatccccttggtttcaaggaaagctggggtttcgggaaagttgtatttaagagatatctcagatacgacaggacggaagcttcactgcacagagtccttggatcttggacgggagattcggttaactatgcagcatctcgatttttcggtttcgaccagatcggatgtacctatagtattcggtttcgaggagttagtatcaccgtttctggagggtcgcgaactcttcagcatctctgtgagatggcaattcggtctaagcaagaactgctacagcttgccccaatcgaagtggaaagtaatgtatcaagaggatgccctgaaggtactcaaaccttcgaaaaagaaagcgagtaagttaaaatgcttcttcgtctcctatttataatatggtttgttattgttaattttgttcttgtagaagagcttaattaatcgttgttgttatgaaatactatttgtatgagatgaactggtgtaatgtaattcatttacataagtggagtcagaatcagaatgtttcctccataactaactagacatgaagacctgccgcgtacaattgtcttatatttgaacaactaaaattgaacatcttttgccacaactttataagtggttaatatagctcaaatatatggtcaagttcaatagattaataatggaaatatcagttatcgaaattcattaacaatcaacttaacgttattaactactaattttatatcatcccctttgataaatgatagtacaccaattaggaaggagcatgctcgcctaggagattgtcgtttcccgccttcagtttgcaagctgctctagccgtgtagccaatacgcaaaccgcctctccccgcgcgttgggaattactagcgcgtgtcgacaagcttgcatgccggtcaacatggtggagcacgacacacttgtctactccaaaaatatcaaagatacagtctcagaagaccaaagggcaattgagacttttcaacaaagggtaatatccggaaacctcctcggattccattgcccagctatctgtcactttattgtgaagatagtggaaaaggaaggtggctcctacaaatgccatcattgcgataaaggaaaggccatcgttgaagatgcctctgccgacagtggtcccaaagatggacccccacccacgaggagcatcgtggaaaaagaagacgttccaaccacgtcttcaaagcaagtggattgatgtgataacatggtggagcacgacacacttgtctactccaaaaatatcaaagatacagtctcagaagaccaaagggcaattgagacttttcaacaaagggtaatatccggaaacctcctcggattccattgcccagctatctgtcactttattgtgaagatagtggaaaaggaaggtggctcctacaaatgccatcattgcgataaaggaaaggccatcgttgaagatgcctctgccgacagtggtcccaaagatggacccccacccacgaggagcatcgtggaaaaagaagacgttccaaccacgtcttcaaagcaagtggattgatgtgatatctccactgacgtaagggatgacgcacaatcccactatccttcgcaagacccttcctctatataaggaagttcatttcatttggagaggcactccatttgaatctatcaaaccaaaacacattgagcaaaatggcgaaaaacgttgcgattttcggcttattgttttctcttcttgtgttggttccttctcagatcttcgcgacgtcactcctcagccaaaacgacacccccatctgtctatccactggcccctggatctgctgcccaaactaactccatggtgaccctgggatgcctggtcaagggctatttccctgagccagtgacagtgacctggaactctggatccctgtccagcggtgtgcacaccttcccagctgtcctgcagtctgacctctacactctgagcagctcagtgactgtcccctccagcacctggcccagcgagaccgtcacctgcaacgttgcccacccggccagcagcaccaaggtggacaagaaaattgtgcccagggattgtggttgtaagccttgcatatgtacagtcccagaagtatcatctgtcttcatcttccccccaaagcccaaggatgtgctcaccattactctgactcctaaggtcacgtgtgttgtggtagacatcagcaaggatgatcccgaggtccagttcagctggtttgtagatgatgtggaggtgcacacagctcagacgcaaccccgggaggagcagttcaacagcactttccgctcagtcagtgaacttcccatcatgcaccaggactggctcaatggcaaggagacgtccagattttggcgatctattcaactgtcgccagttcattggtactggtagtctccctgggggcaatcagtttctggatgtgctctaatgggtctctacagtgtagaatatgtatttaaaggccttagtcgtgtcgtttttcaaataatataatccttttagggttttagttagtttaaattttctgttgctcctgtttagcaggtcgtgccttcagcaagcacacaaaaacagagtgtttattttaagttgtttgtttagtgattcaaaaaaaaaatcgttcaaacatttggcaataaagtttcttaagattgaatcctgttgccggtcttgcgatgattatcatataatttctgttgaattacgttaagcatgtaataattaacatgtaatgcatgacgttatttatgagatgggtttttatgattagagtcccgcaattatacatttaatacgcgatagaaaacaaaatatagcgcgcaaactaggataaattatcgcgcgcggtgtcatctatgttactagatctctagagtctcaagcttggcgcgcccacgtgactagtggcactggccgtcgttttacaacgtcgtgactgggaaaaccctggcgttacccaacttaatcgccttgcagcacatccccctttcgccagctggcgtaatagcgaagaggcccgcaccgatcgcccttcccaacagttgcgcagcctgaatggcgaatgctagagcagcttgagcttggatcagattgtcgtttcccgccttcagtttaaactatcagtgtttgacaggatatattggcgggtaaacctaagagaaaagagcgttta

SEQ ID NO: 36 - DNA, 5045 bp, Artificial Sequence
  Construct 8591 from 2X35S prom to NOS term
gtcaacatggtggagcacgacacacttgtctactccaaaaatatcaaagatacagtctcagaagaccaaagggcaattgagacttttcaacaaagggtaatatccggaaacctcctcggattccattgcccagctatctgtcactttattgtgaagatagtggaaaaggaaggtggctcctacaaatgccatcattgcgataaaggaaaggccatcgttgaagatgcctctgccgacagtggtcccaaagatggacccccacccacgaggagcatcgtggaaaaagaagacgttccaaccacgtcttcaaagcaagtggattgatgtgataacatggtggagcacgacacacttgtctactccaaaaatatcaaagatacagtctcagaagaccaaagggcaattgagacttttcaacaaagggtaatatccggaaacctcctcggattccattgcccagctatctgtcactttattgtgaagatagtggaaaaggaaggtggctcctacaaatgccatcattgcgataaaggaaaggccatcgttgaagatgcctctgccgacagtggtcccaaagatggacccccacccacgaggagcatcgtggaaaaagaagacgttccaaccacgtcttcaaagcaagtggattgatgtgatatctccactgacgtaagggatgacgcacaatcccactatccttcgcaagacccttcctctatataaggaagttcatttcatttggagaggcactccatttgaatctatcaaaccaaaacacattgagcaaaatggcgaaaaacgttgcgattttcggcttattgttttctcttcttgtgttggttccttctcagatcttcgcggtgaatcttacgacgcgaacacagttaccacccgcatatacaaatagcttcactcggggtgtttattaccccgacaaagtgttcaggtcctccgtgctccactcaacacaggacctctttcttcctttcttttctaacgtgacatggtttcatgccattcatgtatccggcactaacggtactaagaggttcgataatcctgtgctccctttcaatgacggcgtttactttgcaagcacagagaagagtaacatcatccgaggttggatctttggcactaccctcgattcaaagacgcagagcctcctcattgtgaacaatgccactaacgtggtgatcaaagtttgcgagtttcagttctgcaatgaccctttcttgggggtgtactatcataagaacaacaagtcttggatggaatctgaattccgcgtctatagcagcgccaacaactgcacctttgaatacgtgtcccagcccttccttatggacctggagggaaagcagggaaactttaagaatctgagagagttcgtgtttaaaaatatcgacggctattttaagatctattctaagcacacgcctattaatctcgtgcgcgatcttccacaaggcttcagcgccctggaaccactcgtggacctcccaattggtatcaacatcactagatttcagactctgcttgccctccaccgatcctatctgacacccggagactcctctagcggctggactgccggcgctgccgcttattacgttggttatcttcagccacgcacgttcctgctgaagtataacgagaatggtactattaccgatgccgtggattgtgcccttgaccccctgtccgaaactaagtgcacactcaagtcattcactgtggaaaaaggaatctaccagacaagcaattttcgggtccagcctactgagagcattgtgcgctttcctaacatcacaaatctttgccccttcggagaggttttcaatgctacacggtttgcctccgtgtatgcctggaaccgcaagagaatttccaattgcgtggccgattactccgtgctctacaatagtgcaagctttagcacctttaagtgctatggcgtatcccctactaagcttaacgacttgtgtttcacaaacgtgtatgccgactcctttgtgatacggggcgacgaagttagacagatagcaccaggacagacgggaaagatagctgactacaactataagcttcctgatgacttcactggctgcgttatcgcgtggaattctaacaacctggactcaaaagtcggcggcaactataactatctctatcggctgttccgcaagagtaaccttaagccctttgagagagatataagcactgaaatctaccaggctggcagtacgccctgtaatggcgtggaaggctttaattgttattttccactgcaatcctatggttttcagccaaccaatggcgtgggctaccaaccataccgcgtcgtggtgctctcctttgaactgctccacgctcccgcgactgtctgcggccccaagaagtccacgaaccttgtgaagaataagtgcgttaattttaatttcaacggcctcactggaacaggagtgctcactgagagtaacaagaagttcctgccatttcaacaatttggcagagacatagccgatactactgacgccgttagggacccccagaccctcgagattctcgatataacgccctgctccttcggtggagtttccgtgatcacgccaggcaccaataccagtaaccaggtcgccgtgctgtatcaggatgtcaactgtactgaggtgcccgtagccatccatgcggatcagctcacaccaacttggagggtgtacagcaccggctccaatgtattccagactcgggccggatgccttattggcgccgaacacgtgaacaatagttacgaatgcgatattccaattggcgccggaatctgtgctagctaccagactcagacgaactccccaggcagcgccagcagcgttgccagccagtcaatcatcgcttatacaatgtcacttggagccgaaaactccgtggcttactcaaacaacagcatcgccatccccacaaacttcaccatatccgtgacaactgagattctgccagtgtccatgactaagacgtccgtagattgcactatgtacatatgcggcgacagcacagaatgttctaatctgctgctgcaatatggaagcttctgcactcaactgaacagagcgctcacaggcatcgccgtggagcaggataagaatacccaggaggtgttcgcccaagttaagcagatctacaagaccccacccataaaggatttcggtggattcaattttagtcagatactcccagacccatctaagccatccaagaggagctttatcgaggatcttttgtttaacaaagttactctggccgacgccggtttcatcaagcagtacggagattgcctcggcgacatcgctgctcgtgacctcatctgtgcgcaaaagtttaacggtctgacggtgctgcctcccctccttactgatgaaatgatcgcccagtataccagcgcactcctcgctggcaccataacatccggttggacattcggcgctggtgcagcactgcagataccattcgccatgcaaatggcatatcgtttcaacggtatcggtgtcacacagaatgtcctatatgagaaccagaagctgatcgcaaatcagttcaatagtgccatcggaaaaatccaggatagccttagcagcacagcctcagcccttggcaaactccaggatgtcgtgaaccagaatgcccaggctctcaataccctcgtgaagcagctctcatctaatttcggcgcaatttccagtgtcctcaacgacatcctcagccgcctcgacccccccgaggccgaagtgcagattgacagactgattacaggtcgactccagagcctccagacttacgtgactcagcagctgataagagccgccgagataagggccagcgctaacctggctgccacaaagatgtctgagtgcgtgctgggccagtccaagagagtagacttctgtggcaaaggctaccatctgatgagcttcccacaatccgcacctcacggcgtagtgttcctccacgtgacatatgtaccggctcaggagaagaatttcactaccgctcctgctatatgccatgatggaaaggctcacttcccccgggagggggtgttcgtgtccaacggcacccattggtttgtgactcagcggaatttctacgaaccccagatcataaccactgacaacacatttgtgtccggaaattgtgacgtggtcattggaatagtgaacaacactgtttatgatccactgcagccagaacttgacagctttaaggaggagctcgacaagtacttcaagaatcatacgtcaccagatgtggacctcggagatattagcggtatcaatgccagtgttgtcaatattcagaaggaaatagaccgccttaatgaggtcgccaaaaatctgaacgagagcctcatcgatcttcaggagctgggcaaatatgagcagtacatcaagtggccttggtatatttggcttggcttcatcgccggcctgatcgccatagtaatggtcacaattatgctctgctgcatgacctcttgctgctcctgtctgaaaggctgctgctcttgcggatcctgctgcaaatttgatgaggatgacagtgaaccagtcctgaagggcgtgaagctgcactatacttagaggccttagtcgtgtcgtttttcaaataatataatccttttagggttttagttagtttaaattttctgttgctcctgtttagcaggtcgtgccttcagcaagcacacaaaaacagagtgtttattttaagttgtttgtttagtgattcaaaaaaaaaatcgttcaaacatttggcaataaagtttcttaagattgaatcctgttgccggtcttgcgatgattatcatataatttctgttgaattacgttaagcatgtaataattaacatgtaatgcatgacgttatttatgagatgggtttttatgattagagtcccgcaattatacatttaatacgcgatagaaaacaaaatatagcgcgcaaactaggataaattatcgcgcgcggtgtcatctatgttactagat

SEQ ID NO: 37 - protein, 39 aa, Artificial Sequence
  C-Terminal Region of Modified SARS-CoV-2 S protein with H5i Hemagglutinin CT, Variation 2
WYIWLGFIAGLIAIVMVTIMAGLSLWMCSNGSLQCRICI

SEQ ID NO: 38 - protein, 36 aa, Artificial Sequence
  C-Terminal Region of Modified SARS-CoV-2 S protein with H5i Hemagglutinin CT, Variation 3
WYIWLGFIAGLIAIVMVTIMLCCMCSNGSLQCRICI

SEQ ID NO: 39 - protein, 34 aa, Artificial Sequence
  C-Terminal Region of Modified SARS-CoV-2 S protein with H5i Hemagglutinin CT, Variation 4
WYIWLGFIAGLIAIVMVTIMLCCSNGSLQCRICI

SEQ ID NO: 40 - DNA, 151 bp, Arracacha Virus B
tagtcgtgtcgtttttcaaataatataatccttttagggttttagttagtttaaattttctgttgctcctgtttagcaggtcgtgccttcagcaagcacacaaaaacagagtgtttattttaagttgtttgtttagtgattcaaaaaaaaa

SEQ ID NO: 41 - DNA, 182 bp, Beet necrotic yellow vein virus
cctatcttgatgaaggttgttgtggttttctcattactgttttattattgtttgagttgcttatgtcggttcttgattatgtggtgcataattattgaactaattgtttgttgggttgtaatgtactgactgggtgtgaattgtaccagtcgttaaagggtttactatcagtatattgatat

SEQ ID NO: 42 - DNA, 132 bp, Southern bean mosaic virus
tgaggagttgtataataatacctgcacccttctctttggcagggagggtgtttcgttttcacaatgccacgcgcttgagggagaatgcacgttaatcatccctccgctagtgatggagcgtaatccaaaagt

SEQ ID NO: 43 - DNA, 282 bp, Turnip ringspot virus
tgatttataatagccatagattaagtttaaatgtattacgtttgtattttattctcttttttaagtttcctatgttgttttaaattaaatatctgtataattagtagatgtaaatctgctttgtgcgtttgacagtctgtggaaacgcactggttcatgagataggaccacctaggaggtaggactctgggttttaattatctcatttcttagttataccgtattatatatatgatttagtagtaattgttttctcttgatatgtattattacttttttatt

SEQ ID NO: 44 - DNA, 165 bp, Cowpea Mosaic virus
attttctttagtttgaatttactgttattcggtgtgcatttctatgtttggtgagcggttttctgtgctcagagtgtgtttattttatgtaatttaatttctttgtgagctcctgtttagcaggtcgtcccttcagcaaggacacaaaaagattttaattttatt

SEQ ID NO: 45 - DNA, 275 bp, Broad bean true mosaic virus
tagttttcttccgcttttcttttgtagtgtgtggttttctttgtttcttcttttcttttctctttccttttctcttactcctgcctggcaggtcgtgccttcagtaagcacaacaaaaatatgcatttattagagtatttctttcttctttagcataaaggtattgaagacctataaacttcgtccgggttggggaaagtaccagcttagcatatctttagaaaactatatagagctctttaccttgagttgtttcctaaagtttatgcaaaaaa

SEQ ID NO: 46 - DNA, 147 bp, Ourmia melon virus
ctcacgtctggggtgagccctagccaaataggaaaacgataagcgctttgcatgcaaaatgagttgggccacaagtgccactcgcagcgaaggcggtctgaggtttccccctggcggttacttccatatctttgggagataactggg

SEQ ID NO: 47 - protein, 1259 aa, Artificial Sequence; identical to SEQ ID NO: 30
  (PDI) Modified SARS-CoV-2 S protein GSAS+PP with H5i Hemagglutinin CT AA

SEQ ID NO: 48 - protein, 1259 aa, Artificial Sequence
  (PDI) Modified SARS-CoV-2 S protein GSAS+4P with H5i Hemagglutinin CT AA
MAKNVAIFGLLFSLLVLVPSQIFAVNLTTRTQLPPAYTNSFTRGVYYPDKVFRSSVLHSTQDLFLPFFSNVTWFHAIHVSGTNGTKRFDNPVLPFNDGVYFASTEKSNIIRGWIFGTTLDSKTQSLLIVNNATNVVIKVCEFQFCNDPFLGVYYHKNNKSWMESEFRVYSSANNCTFEYVSQPFLMDLEGKQGNFKNLREFVFKNIDGYFKIYSKHTPINLVRDLPQGFSALEPLVDLPIGINITRFQTLLALHRSYLTPGDSSSGWTAGAAAYYVGYLQPRTFLLKYNENGTITDAVDCALDPLSETKCTLKSFTVEKGIYQTSNFRVQPTESIVRFPNITNLCPFGEVFNATRFASVYAWNRKRISNCVADYSVLYNSASFSTFKCYGVSPTKLNDLCFTNVYADSFVIRGDEVRQIAPGQTGKIADYNYKLPDDFTGCVIAWNSNNLDSKVGGNYNYLYRLFRKSNLKPFERDISTEIYQAGSTPCNGVEGFNCYFPLQSYGFQPTNGVGYQPYRVVVLSFELLHAPATVCGPKKSTNLVKNKCVNFNFNGLTGTGVLTESNKKFLPFQQFGRDIADTTDAVRDPQTLEILDITPCSFGGVSVITPGTNTSNQVAVLYQDVNCTEVPVAIHADQLTPTWRVYSTGSNVFQTRAGCLIGAEHVNNSYECDIPIGAGICASYQTQTNSPGSASSVASQSIIAYTMSLGAENSVAYSNNSIAIPTNFTISVTTEILPVSMTKTSVDCTMYICGDSTECSNLLLQYGSFCTQLNRALTGIAVEQDKNTQEVFAQVKQIYKTPPIKDFGGFNFSQILPDPSKPSKRSPIEDLLFNKVTLADAGFIKQYGDCLGDIAARDLICAQKFNGLTVLPPLLTDEMIAQYTSALLAGTITSGWTFGAGAALQIPFAMQMAYRFNGIGVTQNVLYENQKLIANQFNSAIGKIQDSLSSTPSALGKLQDVVNQNAQALNTLVKQLSSNFGAISSVLNDILSRLDPPEAEVQIDRLITGRLQSLQTYVTQQLIRAAEIRASANLAATKMSECVLGQSKRVDFCGKGYHLMSFPQSAPHGVVFLHVTYVPAQEKNFTTAPAICHDGKAHFPREGVFVSNGTHWFVTQRNFYEPQIITTDNTFVSGNCDVVIGIVNNTVYDPLQPELDSFKEELDKYFKNHTSPDVDLGDISGINASVVNIQKEIDRLNEVAKNLNESLIDLQELGKYEQYIKWPWYIWLGFIAGLIAIVMVTIMLSLWMCSNGSLQCRICI

SEQ ID NO: 49 - protein, 1259 aa, Artificial Sequence
  (PDI) Modified SARS-CoV-2 S protein GSAS+6P with H5i Hemagglutinin CT AA
MAKNVAIFGLLFSLLVLVPSQIFAVNLTTRTQLPPAYTNSFTRGVYYPDKVFRSSVLHSTQDLFLPFFSNVTWFHAIHVSGTNGTKRFDNPVLPFNDGVYFASTEKSNIIRGWIFGTTLDSKTQSLLIVNNATNVVIKVCEFQFCNDPFLGVYYHKNNKSWMESEFRVYSSANNCTFEYVSQPFLMDLEGKQGNFKNLREFVFKNIDGYFKIYSKHTPINLVRDLPQGFSALEPLVDLPIGINITRFQTLLALHRSYLTPGDSSSGWTAGAAAYYVGYLQPRTFLLKYNENGTITDAVDCALDPLSETKCTLKSFTVEKGIYQTSNFRVQPTESIVRFPNITNLCPFGEVFNATRFASVYAWNRKRISNCVADYSVLYNSASFSTFKCYGVSPTKLNDLCFTNVYADSFVIRGDEVRQIAPGQTGKIADYNYKLPDDFTGCVIAWNSNNLDSKVGGNYNYLYRLFRKSNLKPFERDISTEIYQAGSTPCNGVEGFNCYFPLQSYGFQPTNGVGYQPYRVVVLSFELLHAPATVCGPKKSTNLVKNKCVNFNFNGLTGTGVLTESNKKFLPFQQFGRDIADTTDAVRDPQTLEILDITPCSFGGVSVITPGTNTSNQVAVLYQDVNCTEVPVAIHADQLTPTWRVYSTGSNVFQTRAGCLIGAEHVNNSYECDIPIGAGICASYQTQTNSPGSASSVASQSIIAYTMSLGAENSVAYSNNSIAIPTNFTISVTTEILPVSMTKTSVDCTMYICGDSTECSNLLLQYGSFCTQLNRALTGIAVEQDKNTQEVFAQVKQIYKTPPIKDFGGFNFSQILPDPSKPSKRSPIEDLLFNKVTLADAGFIKQYGDCLGDIAARDLICAQKFNGLTVLPPLLTDEMIAQYTSALLAGTITSGWTFGAGPALQIPFPMQMAYRFNGIGVTQNVLYENQKLIANQFNSAIGKIQDSLSSTPSALGKLQDVVNQNAQALNTLVKQLSSNFGAISSVLNDILSRLDPPEAEVQIDRLITGRLQSLQTYVTQQLIRAAEIRASANLAATKMSECVLGQSKRVDFCGKGYHLMSFPQSAPHGVVFLHVTYVPAQEKNFTTAPAICHDGKAHFPREGVFVSNGTHWFVTQRNFYEPQIITTDNTFVSGNCDVVIGIVNNTVYDPLQPELDSFKEELDKYFKNHTSPDVDLGDISGINASVVNIQKEIDRLNEVAKNLNESLIDLQELGKYEQYIKWPWYIWLGFIAGLIAIVMVTIMLSLWMCSNGSLQCRICI

SEQ ID NO: 50 - protein, 1259 aa, Artificial Sequence
  (PDI) Modified SARS-CoV-2 S protein GSAS+PP+923 with H5i Hemagglutinin CT AA
MAKNVAIFGLLFSLLVLVPSQIFAVNLTTRTQLPPAYTNSFTRGVYYPDKVFRSSVLHSTQDLFLPFFSNVTWFHAIHVSGTNGTKRFDNPVLPFNDGVYFASTEKSNIIRGWIFGTTLDSKTQSLLIVNNATNVVIKVCEFQFCNDPFLGVYYHKNNKSWMESEFRVYSSANNCTFEYVSQPFLMDLEGKQGNFKNLREFVFKNIDGYFKIYSKHTPINLVRDLPQGFSALEPLVDLPIGINITRFQTLLALHRSYLTPGDSSSGWTAGAAAYYVGYLQPRTFLLKYNENGTITDAVDCALDPLSETKCTLKSFTVEKGIYQTSNFRVQPTESIVRFPNITNLCPFGEVFNATRFASVYAWNRKRISNCVADYSVLYNSASFSTFKCYGVSPTKLNDLCFTNVYADSFVIRGDEVRQIAPGQTGKIADYNYKLPDDFTGCVIAWNSNNLDSKVGGNYNYLYRLFRKSNLKPFERDISTEIYQAGSTPCNGVEGFNCYFPLQSYGFQPTNGVGYQPYRVVVLSFELLHAPATVCGPKKSTNLVKNKCVNFNFNGLTGTGVLTESNKKFLPFQQFGRDIADTTDAVRDPQTLEILDITPCSFGGVSVITPGTNTSNQVAVLYQDVNCTEVPVAIHADQLTPTWRVYSTGSNVFQTRAGCLIGAEHVNNSYECDIPIGAGICASYQTQTNSPGSASSVASQSIIAYTMSLGAENSVAYSNNSIAIPTNFTISVTTEILPVSMTKTSVDCTMYICGDSTECSNLLLQYGSFCTQLNRALTGIAVEQDKNTQEVFAQVKQIYKTPPIKDFGGFNFSQILPDPSKPSKRSFIEDLLFNKVTLADAGFIKQYGDCLGDIAARDLICAQKFNGLTVLPPLLTDEMIAQYTSALLAGTITSGWTFGAGAALQIPFAMQMAYRFNGIGVTQNVLYENQKLIANQFNSAIGKIQDSFSSTASALGKLQDVVNQNAQALNTLVKQLSSNFGAISSVLNDILSRLDPPEAEVQIDRLITGRLQSLQTYVTQQLIRAAEIRASANLAATKMSECVLGQSKRVDFCGKGYHLMSFPQSAPHGVVFLHVTYVPAQEKNFTTAPAICHDGKAHFPREGVFVSNGTHWFVTQRNFYEPQIITTDNTFVSGNCDVVIGIVNNTVYDPLQPELDSFKEELDKYFKNHTSPDVDLGDISGINASVVNIQKEIDRLNEVAKNLNESLIDLQELGKYEQYIKWPWYIWLGFIAGLIAIVMVTIMLSLWMCSNGSLQCRICI

SEQ ID NO: 51 - protein, 1259 aa, Artificial Sequence
  (PDI) Modified SARS-CoV-2 S protein GSAS+4P+923 with H5i Hemagglutinin CT AA
MAKNVAIFGLLFSLLVLVPSQIFAVNLTTRTQLPPAYTNSFTRGVYYPDKVFRSSVLHSTQDLFLPFFSNVTWFHAIHVSGTNGTKRFDNPVLPFNDGVYFASTEKSNIIRGWIFGTTLDSKTQSLLIVNNATNVVIKVCEFQFCNDPFLGVYYHKNNKSWMESEFRVYSSANNCTFEYVSQPFLMDLEGKQGNFKNLREFVFKNIDGYFKIYSKHTPINLVRDLPQGFSALEPLVDLPIGINITRFQTLLALHRSYLTPGDSSSGWTAGAAAYYVGYLQPRTFLLKYNENGTITDAVDCALDPLSETKCTLKSFTVEKGIYQTSNFRVQPTESIVRFPNITNLCPFGEVFNATRFASVYAWNRKRISNCVADYSVLYNSASFSTFKCYGVSPTKLNDLCFTNVYADSFVIRGDEVRQIAPGQTGKIADYNYKLPDDFTGCVIAWNSNNLDSKVGGNYNYLYRLFRKSNLKPFERDISTEIYQAGSTPCNGVEGFNCYFPLQSYGFQPTNGVGYQPYRVVVLSFELLHAPATVCGPKKSTNLVKNKCVNFNFNGLTGTGVLTESNKKFLPFQQFGRDIADTTDAVRDPQTLEILDITPCSFGGVSVITPGTNTSNQVAVLYQDVNCTEVPVAIHADQLTPTWRVYSTGSNVFQTRAGCLIGAEHVNNSYECDIPIGAGICASYQTQTNSPGSASSVASQSIIAYTMSLGAENSVAYSNNSIAIPTNFTISVTTEILPVSMTKTSVDCTMYICGDSTECSNLLLQYGSFCTQLNRALTGIAVEQDKNTQEVFAQVKQIYKTPPIKDFGGFNFSQILPDPSKPSKRSPIEDLLFNKVTLADAGFIKQYGDCLGDIAARDLICAQKFNGLTVLPPLLTDEMIAQYTSALLAGTITSGWTFGAGAALQIPFAMQMAYRFNGIGVTQNVLYENQKLIANQFNSAIGKIQDSFSSTPSALGKLQDVVNQNAQALNTLVKQLSSNFGAISSVLNDILSRLDPPEAEVQIDRLITGRLQSLQTYVTQQLIRAAEIRASANLAATKMSECVLGQSKRVDFCGKGYHLMSFPQSAPHGVVFLHVTYVPAQEKNFTTAPAICHDGKAHFPREGVFVSNGTHWFVTQRNFYEPQIITTDNTFVSGNCDVVIGIVNNTVYDPLQPELDSFKEELDKYFKNHTSPDVDLGDISGINASVVNIQKEIDRLNEVAKNLNESLIDLQELGKYEQYIKWPWYIWLGFIAGLIAIVMVTIMLSLWMCSNGSLQCRICI

SEQ ID NO: 52 - protein, 1259 aa, Artificial Sequence
  (PDI) Modified SARS-CoV-2 S protein GSAS+6P+923 with H5i Hemagglutinin CT AA
MAKNVAIFGLLFSLLVLVPSQIFAVNLTTRTQLPPAYTNSFTRGVYYPDKVFRSSVLHSTQDLFLPFFSNVTWFHAIHVSGTNGTKRFDNPVLPFNDGVYFASTEKSNIIRGWIFGTTLDSKTQSLLIVNNATNVVIKVCEFQFCNDPFLGVYYHKNNKSWMESEFRVYSSANNCTFEYVSQPFLMDLEGKQGNFKNLREFVFKNIDGYFKIYSKHTPINLVRDLPQGFSALEPLVDLPIGINITRFQTLLALHRSYLTPGDSSSGWTAGAAAYYVGYLQPRTFLLKYNENGTITDAVDCALDPLSETKCTLKSFTVEKGIYQTSNFRVQPTESIVRFPNITNLCPFGEVFNATRFASVYAWNRKRISNCVADYSVLYNSASFSTFKCYGVSPTKLNDLCFTNVYADSFVIRGDEVRQIAPGQTGKIADYNYKLPDDFTGCVIAWNSNNLDSKVGGNYNYLYRLFRKSNLKPFERDISTEIYQAGSTPCNGVEGFNCYFPLQSYGFQPTNGVGYQPYRVVVLSFELLHAPATVCGPKKSTNLVKNKCVNFNFNGLTGTGVLTESNKKFLPFQQFGRDIADTTDAVRDPQTLEILDITPCSFGGVSVITPGTNTSNQVAVLYQDVNCTEVPVAIHADQLTPTWRVYSTGSNVFQTRAGCLIGAEHVNNSYECDIPIGAGICASYQTQTNSPGSASSVASQSIIAYTMSLGAENSVAYSNNSIAIPTNFTISVTTEILPVSMTKTSVDCTMYICGDSTECSNLLLQYGSFCTQLNRALTGIAVEQDKNTQEVFAQVKQIYKTPPIKDFGGFNFSQILPDPSKPSKRSPIEDLLFNKVTLADAGFIKQYGDCLGDIAARDLICAQKFNGLTVLPPLLTDEMIAQYTSALLAGTITSGWTFGAGPALQIPFPMQMAYRFNGIGVTQNVLYENQKLIANQFNSAIGKIQDSFSSTPSALGKLQDVVNQNAQALNTLVKQLSSNFGAISSVLNDILSRLDPPEAEVQIDRLITGRLQSLQTYVTQQLIRAAEIRASANLAATKMSECVLGQSKRVDFCGKGYHLMSFPQSAPHGVVFLHVTYVPAQEKNFTTAPAICHDGKAHFPREGVFVSNGTHWFVTQRNFYEPQIITTDNTFVSGNCDVVIGIVNNTVYDPLQPELDSFKEELDKYFKNHTSPDVDLGDISGINASVVNIQKEIDRLNEVAKNLNESLIDLQELGKYEQYIKWPWYIWLGFIAGLIAIVMVTIMLSLWMCSNGSLQCRICI

SEQ ID NO: 53 - protein, 1259 aa, Artificial Sequence
  (PDI) Modified SARS-CoV-2 S protein GSAS+PP with H1 Cal Hemagglutinin CT AA
MAKNVAIFGLLFSLLVLVPSQIFAVNLTTRTQLPPAYTNSFTRGVYYPDKVFRSSVLHSTQDLFLPFFSNVTWFHAIHVSGTNGTKRFDNPVLPFNDGVYFASTEKSNIIRGWIFGTTLDSKTQSLLIVNNATNVVIKVCEFQFCNDPFLGVYYHKNNKSWMESEFRVYSSANNCTFEYVSQPFLMDLEGKQGNFKNLREFVFKNIDGYFKIYSKHTPINLVRDLPQGFSALEPLVDLPIGINITRFQTLLALHRSYLTPGDSSSGWTAGAAAYYVGYLQPRTFLLKYNENGTITDAVDCALDPLSETKCTLKSFTVEKGIYQTSNFRVQPTESIVRFPNITNLCPFGEVFNATRFASVYAWNRKRISNCVADYSVLYNSASFSTFKCYGVSPTKLNDLCFTNVYADSFVIRGDEVRQIAPGQTGKIADYNYKLPDDFTGCVIAWNSNNLDSKVGGNYNYLYRLFRKSNLKPFERDISTEIYQAGSTPCNGVEGFNCYFPLQSYGFQPTNGVGYQPYRVVVLSFELLHAPATVCGPKKSTNLVKNKCVNFNFNGLTGTGVLTESNKKFLPFQQFGRDIADTTDAVRDPQTLEILDITPCSFGGVSVITPGTNTSNQVAVLYQDVNCTEVPVAIHADQLTPTWRVYSTGSNVFQTRAGCLIGAEHVNNSYECDIPIGAGICASYQTQTNSPGSASSVASQSIIAYTMSLGAENSVAYSNNSIAIPTNFTISVTTEILPVSMTKTSVDCTMYICGDSTECSNLLLQYGSFCTQLNRALTGIAVEQDKNTQEVFAQVKQIYKTPPIKDFGGFNFSQILPDPSKPSKRSFIEDLLFNKVTLADAGFIKQYGDCLGDIAARDLICAQKFNGLTVLPPLLTDEMIAQYTSALLAGTITSGWTFGAGAALQIPFAMQMAYRFNGIGVTQNVLYENQKLIANQFNSAIGKIQDSLSSTASALGKLQDVVNQNAQALNTLVKQLSSNFGAISSVLNDILSRLDPPEAEVQIDRLITGRLQSLQTYVTQQLIRAAEIRASANLAATKMSECVLGQSKRVDFCGKGYHLMSFPQSAPHGVVFLHVTYVPAQEKNFTTAPAICHDGKAHFPREGVFVSNGTHWFVTQRNFYEPQIITTDNTFVSGNCDVVIGIVNNTVYDPLQPELDSFKEELDKYFKNHTSPDVDLGDISGINASVVNIQKEIDRLNEVAKNLNESLIDLQELGKYEQYIKWPWYIWLGFIAGLIAIVMVTIMLSFWMCSNGSLQCRICI

SEQ ID NO: 54 - protein, 1258 aa, Artificial Sequence
  (PDI) Modified SARS-CoV-2 S protein GSAS+PP with H3 Minn Hemagglutinin CT AA
MAKNVAIFGLLFSLLVLVPSQIFAVNLTTRTQLPPAYTNSFTRGVYYPDKVFRSSVLHSTQDLFLPFFSNVTWFHAIHVSGTNGTKRFDNPVLPFNDGVYFASTEKSNIIRGWIFGTTLDSKTQSLLIVNNATNVVIKVCEFQFCNDPFLGVYYHKNNKSWMESEFRVYSSANNCTFEYVSQPFLMDLEGKQGNFKNLREFVFKNIDGYFKIYSKHTPINLVRDLPQGFSALEPLVDLPIGINITRFQTLLALHRSYLTPGDSSSGWTAGAAAYYVGYLQPRTFLLKYNENGTITDAVDCALDPLSETKCTLKSFTVEKGIYQTSNFRVQPTESIVRFPNITNLCPFGEVFNATRFASVYAWNRKRISNCVADYSVLYNSASFSTFKCYGVSPTKLNDLCFTNVYADSFVIRGDEVRQIAPGQTGKIADYNYKLPDDFTGCVIAWNSNNLDSKVGGNYNYLYRLFRKSNLKPFERDISTEIYQAGSTPCNGVEGFNCYFPLQSYGFQPTNGVGYQPYRVVVLSFELLHAPATVCGPKKSTNLVKNKCVNFNFNGLTGTGVLTESNKKFLPFQQFGRDIADTTDAVRDPQTLEILDITPCSFGGVSVITPGTNTSNQVAVLYQDVNCTEVPVAIHADQLTPTWRVYSTGSNVFQTRAGCLIGAEHVNNSYECDIPIGAGICASYQTQTNSPGSASSVASQSIIAYTMSLGAENSVAYSNNSIAIPTNFTISVTTEILPVSMTKTSVDCTMYICGDSTECSNLLLQYGSFCTQLNRALTGIAVEQDKNTQEVFAQVKQIYKTPPIKDFGGFNFSQILPDPSKPSKRSFIEDLLFNKVTLADAGFIKQYGDCLGDIAARDLICAQKFNGLTVLPPLLTDEMIAQYTSALLAGTITSGWTFGAGAALQIPFAMQMAYRFNGIGVTQNVLYENQKLIANQFNSAIGKIQDSLSSTASALGKLQDVVNQNAQALNTLVKQLSSNFGAISSVLNDILSRLDPPEAEVQIDRLITGRLQSLQTYVTQQLIRAAEIRASANLAATKMSECVLGQSKRVDFCGKGYHLMSFPQSAPHGVVFLHVTYVPAQEKNFTTAPAICHDGKAHFPREGVFVSNGTHWFVTQRNFYEPQIITTDNTFVSGNCDVVIGIVNNTVYDPLQPELDSFKEELDKYFKNHTSPDVDLGDISGINASVVNIQKEIDRLNEVAKNLNESLIDLQELGKYEQYIKWPWYIWLGFIAGLIAIVMVTIMLMWACQKGNIRCNICI

SEQ ID NO: 55 - protein, 1259 aa, Artificial Sequence
  (PDI) Modified SARS-CoV-2 S protein GSAS+PP with H6 HK Hemagglutinin CT AA
MAKNVAIFGLLFSLLVLVPSQIFAVNLTTRTQLPPAYTNSFTRGVYYPDKVFRSSVLHSTQDLFLPFFSNVTWFHAIHVSGTNGTKRFDNPVLPFNDGVYFASTEKSNIIRGWIFGTTLDSKTQSLLIVNNATNVVIKVCEFQFCNDPFLGVYYHKNNKSWMESEFRVYSSANNCTFEYVSQPFLMDLEGKQGNFKNLREFVFKNIDGYFKIYSKHTPINLVRDLPQGFSALEPLVDLPIGINITRFQTLLALHRSYLTPGDSSSGWTAGAAAYYVGYLQPRTFLLKYNENGTITDAVDCALDPLSETKCTLKSFTVEKGIYQTSNFRVQPTESIVRFPNITNLCPFGEVFNATRFASVYAWNRKRISNCVADYSVLYNSASFSTFKCYGVSPTKLNDLCFTNVYADSFVIRGDEVRQIAPGQTGKIADYNYKLPDDFTGCVIAWNSNNLDSKVGGNYNYLYRLFRKSNLKPFERDISTEIYQAGSTPCNGVEGFNCYFPLQSYGFQPTNGVGYQPYRVVVLSFELLHAPATVCGPKKSTNLVKNKCVNFNFNGLTGTGVLTESNKKFLPFQQFGRDIADTTDAVRDPQTLEILDITPCSFGGVSVITPGTNTSNQVAVLYQDVNCTEVPVAIHADQLTPTWRVYSTGSNVFQTRAGCLIGAEHVNNSYECDIPIGAGICASYQTQTNSPGSASSVASQSIIAYTMSLGAENSVAYSNNSIAIPTNFTISVTTEILPVSMTKTSVDCTMYICGDSTECSNLLLQYGSFCTQLNRALTGIAVEQDKNTQEVFAQVKQIYKTPPIKDFGGFNFSQILPDPSKPSKRSFIEDLLFNKVTLADAGFIKQYGDCLGDIAARDLICAQKFNGLTVLPPLLTDEMIAQYTSALLAGTITSGWTFGAGAALQIPFAMQMAYRFNGIGVTQNVLYENQKLIANQFNSAIGKIQDSLSSTASALGKLQDVVNQNAQALNTLVKQLSSNFGAISSVLNDILSRLDPPEAEVQIDRLITGRLQSLQTYVTQQLIRAAEIRASANLAATKMSECVLGQSKRVDFCGKGYHLMSFPQSAPHGVVFLHVTYVPAQEKNFTTAPAICHDGKAHFPREGVFVSNGTHWFVTQRNFYEPQIITTDNTFVSGNCDVVIGIVNNTVYDPLQPELDSFKEELDKYFKNHTSPDVDLGDISGINASVVNIQKEIDRLNEVAKNLNESLIDLQELGKYEQYIKWPWYIWLGFIAGLIAIVMVTIMLGLWMCSNGSMQCRICI

SEQ ID NO: 56 - protein, 1259 aa, Artificial Sequence
  (PDI) Modified SARS-CoV-2 S protein GSAS+PP with H7 Guangdong Hemagglutinin CT AA
MAKNVAIFGLLFSLLVLVPSQIFAVNLTTRTQLPPAYTNSFTRGVYYPDKVFRSSVLHSTQDLFLPFFSNVTWFHAIHVSGTNGTKRFDNPVLPFNDGVYFASTEKSNIIRGWIFGTTLDSKTQSLLIVNNATNVVIKVCEFQFCNDPFLGVYYHKNNKSWMESEFRVYSSANNCTFEYVSQPFLMDLEGKQGNFKNLREFVFKNIDGYFKIYSKHTPINLVRDLPQGFSALEPLVDLPIGINITRFQTLLALHRSYLTPGDSSSGWTAGAAAYYVGYLQPRTFLLKYNENGTITDAVDCALDPLSETKCTLKSFTVEKGIYQTSNFRVQPTESIVRFPNITNLCPFGEVFNATRFASVYAWNRKRISNCVADYSVLYNSASFSTFKCYGVSPTKLNDLCFTNVYADSFVIRGDEVRQIAPGQTGKIADYNYKLPDDFTGCVIAWNSNNLDSKVGGNYNYLYRLFRKSNLKPFERDISTEIYQAGSTPCNGVEGFNCYFPLQSYGFQPTNGVGYQPYRVVVLSFELLHAPATVCGPKKSTNLVKNKCVNFNFNGLTGTGVLTESNKKFLPFQQFGRDIADTTDAVRDPQTLEILDITPCSFGGVSVITPGTNTSNQVAVLYQDVNCTEVPVAIHADQLTPTWRVYSTGSNVFQTRAGCLIGAEHVNNSYECDIPIGAGICASYQTQTNSPGSASSVASQSIIAYTMSLGAENSVAYSNNSIAIPTNFTISVTTEILPVSMTKTSVDCTMYICGDSTECSNLLLQYGSFCTQLNRALTGIAVEQDKNTQEVFAQVKQIYKTPPIKDFGGFNFSQILPDPSKPSKRSFIEDLLFNKVTLADAGFIKQYGDCLGDIAARDLICAQKFNGLTVLPPLLTDEMIAQYTSALLAGTITSGWTFGAGAALQIPFAMQMAYRFNGIGVTQNVLYENQKLIANQFNSAIGKIQDSLSSTASALGKLQDVVNQNAQALNTLVKQLSSNFGAISSVLNDILSRLDPPEAEVQIDRLITGRLQSLQTYVTQQLIRAAEIRASANLAATKMSECVLGQSKRVDFCGKGYHLMSFPQSAPHGVVFLHVTYVPAQEKNFTTAPAICHDGKAHFPREGVFVSNGTHWFVTQRNFYEPQIITTDNTFVSGNCDVVIGIVNNTVYDPLQPELDSFKEELDKYFKNHTSPDVDLGDISGINASVVNIQKEIDRLNEVAKNLNESLIDLQELGKYEQYIKWPWYIWLGFIAGLIAIVMVTIMLVFICVKNGNMRCTICI

SEQ ID NO: 57 - protein, 1259 aa, Artificial Sequence
  (PDI) Modified SARS-CoV-2 S protein GSAS+PP with H9 HK Hemagglutinin CT AA
MAKNVAIFGLLFSLLVLVPSQIFAVNLTTRTQLPPAYTNSFTRGVYYPDKVFRSSVLHSTQDLFLPFFSNVTWFHAIHVSGTNGTKRFDNPVLPFNDGVYFASTEKSNIIRGWIFGTTLDSKTQSLLIVNNATNVVIKVCEFQFCNDPFLGVYYHKNNKSWMESEFRVYSSANNCTFEYVSQPFLMDLEGKQGNFKNLREFVFKNIDGYFKIYSKHTPINLVRDLPQGFSALEPLVDLPIGINITRFQTLLALHRSYLTPGDSSSGWTAGAAAYYVGYLQPRTFLLKYNENGTITDAVDCALDPLSETKCTLKSFTVEKGIYQTSNFRVQPTESIVRFPNITNLCPFGEVFNATRFASVYAWNRKRISNCVADYSVLYNSASFSTFKCYGVSPTKLNDLCFTNVYADSFVIRGDEVRQIAPGQTGKIADYNYKLPDDFTGCVIAWNSNNLDSKVGGNYNYLYRLFRKSNLKPFERDISTEIYQAGSTPCNGVEGFNCYFPLQSYGFQPTNGVGYQPYRVVVLSFELLHAPATVCGPKKSTNLVKNKCVNFNFNGLTGTGVLTESNKKFLPFQQFGRDIADTTDAVRDPQTLEILDITPCSFGGVSVITPGTNTSNQVAVLYQDVNCTEVPVAIHADQLTPTWRVYSTGSNVFQTRAGCLIGAEHVNNSYECDIPIGAGICASYQTQTNSPGSASSVASQSIIAYTMSLGAENSVAYSNNSIAIPTNFTISVTTEILPVSMTKTSVDCTMYICGDSTECSNLLLQYGSFCTQLNRALTGIAVEQDKNTQEVFAQVKQIYKTPPIKDFGGFNFSQILPDPSKPSKRSFIEDLLFNKVTLADAGFIKQYGDCLGDIAARDLICAQKFNGLTVLPPLLTDEMIAQYTSALLAGTITSGWTFGAGAALQIPFAMQMAYRFNGIGVTQNVLYENQKLIANQFNSAIGKIQDSLSSTASALGKLQDVVNQNAQALNTLVKQLSSNFGAISSVLNDILSRLDPPEAEVQIDRLITGRLQSLQTYVTQQLIRAAEIRASANLAATKMSECVLGQSKRVDFCGKGYHLMSFPQSAPHGVVFLHVTYVPAQEKNFTTAPAICHDGKAHFPREGVFVSNGTHWFVTQRNFYEPQIITTDNTFVSGNCDVVIGIVNNTVYDPLQPELDSFKEELDKYFKNHTSPDVDLGDISGINASVVNIQKEIDRLNEVAKNLNESLIDLQELGKYEQYIKWPWYIWLGFIAGLIAIVMVTIMLLFWAMSNGSCRCNICI

SEQ ID NO: 58 - protein, 1259 aa, Artificial Sequence
  (PDI) Modified SARS-CoV-2 S protein GSAS+PP with B/Wash Hemagglutinin CT AA
MAKNVAIFGLLFSLLVLVPSQIFAVNLTTRTQLPPAYTNSFTRGVYYPDKVFRSSVLHSTQDLFLPFFSNVTWFHAIHVSGTNGTKRFDNPVLPFNDGVYFASTEKSNIIRGWIFGTTLDSKTQSLLIVNNATNVVIKVCEFQFCNDPFLGVYYHKNNKSWMESEFRVYSSANNCTFEYVSQPFLMDLEGKQGNFKNLREFVFKNIDGYFKIYSKHTPINLVRDLPQGFSALEPLVDLPIGINITRFQTLLALHRSYLTPGDSSSGWTAGAAAYYVGYLQPRTFLLKYNENGTITDAVDCALDPLSETKCTLKSFTVEKGIYQTSNFRVQPTESIVRFPNITNLCPFGEVFNATRFASVYAWNRKRISNCVADYSVLYNSASFSTFKCYGVSPTKLNDLCFTNVYADSFVIRGDEVRQIAPGQTGKIADYNYKLPDDFTGCVIAWNSNNLDSKVGGNYNYLYRLFRKSNLKPFERDISTEIYQAGSTPCNGVEGFNCYFPLQSYGFQPTNGVGYQPYRVVVLSFELLHAPATVCGPKKSTNLVKNKCVNFNFNGLTGTGVLTESNKKFLPFQQFGRDIADTTDAVRDPQTLEILDITPCSFGGVSVITPGTNTSNQVAVLYQDVNCTEVPVAIHADQLTPTWRVYSTGSNVFQTRAGCLIGAEHVNNSYECDIPIGAGICASYQTQTNSPGSASSVASQSIIAYTMSLGAENSVAYSNNSIAIPTNFTISVTTEILPVSMTKTSVDCTMYICGDSTECSNLLLQYGSFCTQLNRALTGIAVEQDKNTQEVFAQVKQIYKTPPIKDFGGFNFSQILPDPSKPSKRSFIEDLLFNKVTLADAGFIKQYGDCLGDIAARDLICAQKFNGLTVLPPLLTDEMIAQYTSALLAGTITSGWTFGAGAALQIPFAMQMAYRFNGIGVTQNVLYENQKLIANQFNSAIGKIQDSLSSTASALGKLQDVVNQNAQALNTLVKQLSSNFGAISSVLNDILSRLDPPEAEVQIDRLITGRLQSLQTYVTQQLIRAAEIRASANLAATKMSECVLGQSKRVDFCGKGYHLMSFPQSAPHGVVFLHVTYVPAQEKNFTTAPAICHDGKAHFPREGVFVSNGTHWFVTQRNFYEPQIITTDNTFVSGNCDVVIGIVNNTVYDPLQPELDSFKEELDKYFKNHTSPDVDLGDISGINASVVNIQKEIDRLNEVAKNLNESLIDLQELGKYEQYIKWPWYIWLGFIAGLIAIVMVTIMLVVYMVSRDNVSCSICL

SEQ ID NO: 59 - protein, 1262 aa, Artificial Sequence
  (PDI) Modified SARS-CoV-2 S protein GSAS+PP with H5i Hemagglutinin CT (alternative 1) AA
MAKNVAIFGLLFSLLVLVPSQIFAVNLTTRTQLPPAYTNSFTRGVYYPDKVFRSSVLHSTQDLFLPFFSNVTWFHAIHVSGTNGTKRFDNPVLPFNDGVYFASTEKSNIIRGWIFGTTLDSKTQSLLIVNNATNVVIKVCEFQFCNDPFLGVYYHKNNKSWMESEFRVYSSANNCTFEYVSQPFLMDLEGKQGNFKNLREFVFKNIDGYFKIYSKHTPINLVRDLPQGFSALEPLVDLPIGINITRFQTLLALHRSYLTPGDSSSGWTAGAAAYYVGYLQPRTFLLKYNENGTITDAVDCALDPLSETKCTLKSFTVEKGIYQTSNFRVQPTESIVRFPNITNLCPFGEVFNATRFASVYAWNRKRISNCVADYSVLYNSASFSTFKCYGVSPTKLNDLCFTNVYADSFVIRGDEVRQIAPGQTGKIADYNYKLPDDFTGCVIAWNSNNLDSKVGGNYNYLYRLFRKSNLKPFERDISTEIYQAGSTPCNGVEGFNCYFPLQSYGFQPTNGVGYQPYRVVVLSFELLHAPATVCGPKKSTNLVKNKCVNFNFNGLTGTGVLTESNKKFLPFQQFGRDIADTTDAVRDPQTLEILDITPCSFGGVSVITPGTNTSNQVAVLYQDVNCTEVPVAIHADQLTPTWRVYSTGSNVFQTRAGCLIGAEHVNNSYECDIPIGAGICASYQTQTNSPGSASSVASQSIIAYTMSLGAENSVAYSNNSIAIPTNFTISVTTEILPVSMTKTSVDCTMYICGDSTECSNLLLQYGSFCTQLNRALTGIAVEQDKNTQEVFAQVKQIYKTPPIKDFGGFNFSQILPDPSKPSKRSFIEDLLFNKVTLADAGFIKQYGDCLGDIAARDLICAQKFNGLTVLPPLLTDEMIAQYTSALLAGTITSGWTFGAGAALQIPFAMQMAYRFNGIGVTQNVLYENQKLIANQFNSAIGKIQDSLSSTASALGKLQDVVNQNAQALNTLVKQLSSNFGAISSVLNDILSRLDPPEAEVQIDRLITGRLQSLQTYVTQQLIRAAEIRASANLAATKMSECVLGQSKRVDFCGKGYHLMSFPQSAPHGVVFLHVTYVPAQEKNFTTAPAICHDGKAHFPREGVFVSNGTHWFVTQRNFYEPQIITTDNTFVSGNCDVVIGIVNNTVYDPLQPELDSFKEELDKYFKNHTSPDVDLGDISGINASVVNIQKEIDRLNEVAKNLNESLIDLQELGKYEQYIKWPWYIWLGFIAGLIAIVMVTIMMAGLSLWMCSNGSLQCRICI

SEQ ID NO: 60 - protein, 1261 aa, Artificial Sequence
  (PDI) Modified SARS-CoV-2 S protein GSAS+PP with H5i Hemagglutinin CT (alternative 2) AA
MAKNVAIFGLLFSLLVLVPSQIFAVNLTTRTQLPPAYTNSFTRGVYYPDKVFRSSVLHSTQDLFLPFFSNVTWFHAIHVSGTNGTKRFDNPVLPFNDGVYFASTEKSNIIRGWIFGTTLDSKTQSLLIVNNATNVVIKVCEFQFCNDPFLGVYYHKNNKSWMESEFRVYSSANNCTFEYVSQPFLMDLEGKQGNFKNLREFVFKNIDGYFKIYSKHTPINLVRDLPQGFSALEPLVDLPIGINITRFQTLLALHRSYLTPGDSSSGWTAGAAAYYVGYLQPRTFLLKYNENGTITDAVDCALDPLSETKCTLKSFTVEKGIYQTSNFRVQPTESIVRFPNITNLCPFGEVFNATRFASVYAWNRKRISNCVADYSVLYNSASFSTFKCYGVSPTKLNDLCFTNVYADSFVIRGDEVRQIAPGQTGKIADYNYKLPDDFTGCVIAWNSNNLDSKVGGNYNYLYRLFRKSNLKPFERDISTEIYQAGSTPCNGVEGFNCYFPLQSYGFQPTNGVGYQPYRVVVLSFELLHAPATVCGPKKSTNLVKNKCVNFNFNGLTGTGVLTESNKKFLPFQQFGRDIADTTDAVRDPQTLEILDITPCSFGGVSVITPGTNTSNQVAVLYQDVNCTEVPVAIHADQLTPTWRVYSTGSNVFQTRAGCLIGAEHVNNSYECDIPIGAGICASYQTQTNSPGSASSVASQSIIAYTMSLGAENSVAYSNNSIAIPTNFTISVTTEILPVSMTKTSVDCTMYICGDSTECSNLLLQYGSFCTQLNRALTGIAVEQDKNTQEVFAQVKQIYKTPPIKDFGGFNFSQILPDPSKPSKRSFIEDLLFNKVTLADAGFIKQYGDCLGDIAARDLICAQKFNGLTVLPPLLTDEMIAQYTSALLAGTITSGWTFGAGAALQIPFAMQMAYRFNGIGVTQNVLYENQKLIANQFNSAIGKIQDSLSSTASALGKLQDVVNQNAQALNTLVKQLSSNFGAISSVLNDILSRLDPPEAEVQIDRLITGRLQSLQTYVTQQLIRAAEIRASANLAATKMSECVLGQSKRVDFCGKGYHLMSFPQSAPHGVVFLHVTYVPAQEKNFTTAPAICHDGKAHFPREGVFVSNGTHWFVTQRNFYEPQIITTDNTFVSGNCDVVIGIVNNTVYDPLQPELDSFKEELDKYFKNHTSPDVDLGDISGINASVVNIQKEIDRLNEVAKNLNESLIDLQELGKYEQYIKWPWYIWLGFIAGLIAIVMVTIMAGLSLWMCSNGSLQCRICI

SEQ ID NO: 61 - protein, 1258 aa, Artificial Sequence
  (PDI) Modified SARS-CoV-2 S protein GSAS+PP with H5i Hemagglutinin CT (alternative 3) AA
MAKNVAIFGLLFSLLVLVPSQIFAVNLTTRTQLPPAYTNSFTRGVYYPDKVFRSSVLHSTQDLFLPFFSNVTWFHAIHVSGTNGTKRFDNPVLPFNDGVYFASTEKSNIIRGWIFGTTLDSKTQSLLIVNNATNVVIKVCEFQFCNDPFLGVYYHKNNKSWMESEFRVYSSANNCTFEYVSQPFLMDLEGKQGNFKNLREFVFKNIDGYFKIYSKHTPINLVRDLPQGFSALEPLVDLPIGINITRFQTLLALHRSYLTPGDSSSGWTAGAAAYYVGYLQPRTFLLKYNENGTITDAVDCALDPLSETKCTLKSFTVEKGIYQTSNFRVQPTESIVRFPNITNLCPFGEVFNATRFASVYAWNRKRISNCVADYSVLYNSASFSTFKCYGVSPTKLNDLCFTNVYADSFVIRGDEVRQIAPGQTGKIADYNYKLPDDFTGCVIAWNSNNLDSKVGGNYNYLYRLFRKSNLKPFERDISTEIYQAGSTPCNGVEGFNCYFPLQSYGFQPTNGVGYQPYRVVVLSFELLHAPATVCGPKKSTNLVKNKCVNFNFNGLTGTGVLTESNKKFLPFQQFGRDIADTTDAVRDPQTLEILDITPCSFGGVSVITPGTNTSNQVAVLYQDVNCTEVPVAIHADQLTPTWRVYSTGSNVFQTRAGCLIGAEHVNNSYECDIPIGAGICASYQTQTNSPGSASSVASQSIIAYTMSLGAENSVAYSNNSIAIPTNFTISVTTEILPVSMTKTSVDCTMYICGDSTECSNLLLQYGSFCTQLNRALTGIAVEQDKNTQEVFAQVKQIYKTPPIKDFGGFNFSQILPDPSKPSKRSFIEDLLFNKVTLADAGFIKQYGDCLGDIAARDLICAQKFNGLTVLPPLLTDEMIAQYTSALLAGTITSGWTFGAGAALQIPFAMQMAYRFNGIGVTQNVLYENQKLIANQFNSAIGKIQDSLSSTASALGKLQDVVNQNAQALNTLVKQLSSNFGAISSVLNDILSRLDPPEAEVQIDRLITGRLQSLQTYVTQQLIRAAEIRASANLAATKMSECVLGQSKRVDFCGKGYHLMSFPQSAPHGVVFLHVTYVPAQEKNFTTAPAICHDGKAHFPREGVFVSNGTHWFVTQRNFYEPQIITTDNTFVSGNCDVVIGIVNNTVYDPLQPELDSFKEELDKYFKNHTSPDVDLGDISGINASVVNIQKEIDRLNEVAKNLNESLIDLQELGKYEQYIKWPWYIWLGFIAGLIAIVMVTIMLCCMCSNGSLQCRICI

SEQ ID NO: 62 - protein, 1256 aa, Artificial Sequence
  PDI) Modified SARS-CoV-2 S protein GSAS+PP with H5i Hemagglutinin CT (alternative 4) AA
MAKNVAIFGLLFSLLVLVPSQIFAVNLTTRTQLPPAYTNSFTRGVYYPDKVFRSSVLHSTQDLFLPFFSNVTWFHAIHVSGTNGTKRFDNPVLPFNDGVYFASTEKSNIIRGWIFGTTLDSKTQSLLIVNNATNVVIKVCEFQFCNDPFLGVYYHKNNKSWMESEFRVYSSANNCTFEYVSQPFLMDLEGKQGNFKNLREFVFKNIDGYFKIYSKHTPINLVRDLPQGFSALEPLVDLPIGINITRFQTLLALHRSYLTPGDSSSGWTAGAAAYYVGYLQPRTFLLKYNENGTITDAVDCALDPLSETKCTLKSFTVEKGIYQTSNFRVQPTESIVRFPNITNLCPFGEVFNATRFASVYAWNRKRISNCVADYSVLYNSASFSTFKCYGVSPTKLNDLCFTNVYADSFVIRGDEVRQIAPGQTGKIADYNYKLPDDFTGCVIAWNSNNLDSKVGGNYNYLYRLFRKSNLKPFERDISTEIYQAGSTPCNGVEGFNCYFPLQSYGFQPTNGVGYQPYRVVVLSFELLHAPATVCGPKKSTNLVKNKCVNFNFNGLTGTGVLTESNKKFLPFQQFGRDIADTTDAVRDPQTLEILDITPCSFGGVSVITPGTNTSNQVAVLYQDVNCTEVPVAIHADQLTPTWRVYSTGSNVFQTRAGCLIGAEHVNNSYECDIPIGAGICASYQTQTNSPGSASSVASQSIIAYTMSLGAENSVAYSNNSIAIPTNFTISVTTEILPVSMTKTSVDCTMYICGDSTECSNLLLQYGSFCTQLNRALTGIAVEQDKNTQEVFAQVKQIYKTPPIKDFGGFNFSQILPDPSKPSKRSFIEDLLFNKVTLADAGFIKQYGDCLGDIAARDLICAQKFNGLTVLPPLLTDEMIAQYTSALLAGTITSGWTFGAGAALQIPFAMQMAYRFNGIGVTQNVLYENQKLIANQFNSAIGKIQDSLSSTASALGKLQDVVNQNAQALNTLVKQLSSNFGAISSVLNDILSRLDPPEAEVQIDRLITGRLQSLQTYVTQQLIRAAEIRASANLAATKMSECVLGQSKRVDFCGKGYHLMSFPQSAPHGVVFLHVTYVPAQEKNFTTAPAICHDGKAHFPREGVFVSNGTHWFVTQRNFYEPQIITTDNTFVSGNCDVVIGIVNNTVYDPLQPELDSFKEELDKYFKNHTSPDVDLGDISGINASVVNIQKEIDRLNEVAKNLNESLIDLQELGKYEQYIKWPWYIWLGFIAGLIAIVMVTIMLCCSNGSLQCRICI

SEQ ID NO: 63 - protein, 31 aa, SARS-CoV-2
MFVFLVLLPLVSSQCVNLTTRTQLPPAYTNS

SEQ ID NO: 64 - protein, 42 aa, Artificial Sequence
  Modified TMCT with intervening peptide sequence (X)n
  MISC_FEATURE (21)..(30): Xaa may be absent or present
  misc_feature (36)..(37): Xaa can be any naturally occurring amino acid
  misc_feature (39)..(39): Xaa can be any naturally occurring amino acid
WYIWLGFIAGLIAIVMVTIMXXXXXXXXXXCSNGSXXCXICI

SEQ ID NO: 65 - DNA, 3780 bp, Artificial Sequence
  PDI-S Protein GSAS+4P-DNA
atggcgaaaaacgttgcgattttcggcttattgttttctcttcttgtgttggttccttctcagatcttcgcggtgaatcttacgacgcgaacacagttaccacccgcatatacaaatagcttcactcggggtgtttattaccccgacaaagtgttcaggtcctccgtgctccactcaacacaggacctctttcttcctttcttttctaacgtgacatggtttcatgccattcatgtatccggcactaacggtactaagaggttcgataatcctgtgctccctttcaatgacggcgtttactttgcaagcacagagaagagtaacatcatccgaggttggatctttggcactaccctcgattcaaagacgcagagcctcctcattgtgaacaatgccactaacgtggtgatcaaagtttgcgagtttcagttctgcaatgaccctttcttgggggtgtactatcataagaacaacaagtcttggatggaatctgaattccgcgtctatagcagcgccaacaactgcacctttgaatacgtgtcccagcccttccttatggacctggagggaaagcagggaaactttaagaatctgagagagttcgtgtttaaaaatatcgacggctattttaagatctattctaagcacacgcctattaatctcgtgcgcgatcttccacaaggcttcagcgccctggaaccactcgtggacctcccaattggtatcaacatcactagatttcagactctgcttgccctccaccgatcctatctgacacccggagactcctctagcggctggactgccggcgctgccgcttattacgttggttatcttcagccacgcacgttcctgctgaagtataacgagaatggtactattaccgatgccgtggattgtgcccttgaccccctgtccgaaactaagtgcacactcaagtcattcactgtggaaaaaggaatctaccagacaagcaattttcgggtccagcctactgagagcattgtgcgctttcctaacatcacaaatctttgccccttcggagaggttttcaatgctacacggtttgcctccgtgtatgcctggaaccgcaagagaatttccaattgcgtggccgattactccgtgctctacaatagtgcaagctttagcacctttaagtgctatggcgtatcccctactaagcttaacgacttgtgtttcacaaacgtgtatgccgactcctttgtgatacggggcgacgaagttagacagatagcaccaggacagacgggaaagatagctgactacaactataagcttcctgatgacttcactggctgcgttatcgcgtggaattctaacaacctggactcaaaagtcggcggcaactataactatctctatcggctgttccgcaagagtaaccttaagccctttgagagagatataagcactgaaatctaccaggctggcagtacgccctgtaatggcgtggaaggctttaattgttattttccactgcaatcctatggttttcagccaaccaatggcgtgggctaccaaccataccgcgtcgtggtgctctcctttgaactgctccacgctcccgcgactgtctgcggccccaagaagtccacgaaccttgtgaagaataagtgcgttaattttaatttcaacggcctcactggaacaggagtgctcactgagagtaacaagaagttcctgccatttcaacaatttggcagagacatagccgatactactgacgccgttagggacccccagaccctcgagattctcgatataacgccctgctccttcggtggagtttccgtgatcacgccaggcaccaataccagtaaccaggtcgccgtgctgtatcaggatgtcaactgtactgaggtgcccgtagccatccatgcggatcagctcacaccaacttggagggtgtacagcaccggctccaatgtattccagactcgggccggatgccttattggcgccgaacacgtgaacaatagttacgaatgcgatattccaattggcgccggaatctgtgctagctaccagactcagacgaactccccaggcagcgccagcagcgttgccagccagtcaatcatcgcttatacaatgtcacttggagccgaaaactccgtggcttactcaaacaacagcatcgccatccccacaaacttcaccatatccgtgacaactgagattctgccagtgtccatgactaagacgtccgtagattgcactatgtacatatgcggcgacagcacagaatgttctaatctgctgctgcaatatggaagcttctgcactcaactgaacagagcgctcacaggcatcgccgtggagcaggataagaatacccaggaggtgttcgcccaagttaagcagatctacaagaccccacccataaaggatttcggtggattcaattttagtcagatactcccagacccatctaagccatccaagaggagccccatcgaggatcttttgtttaacaaagttactctggccgacgccggtttcatcaagcagtacggagattgcctcggcgacatcgctgctcgtgacctcatctgtgcgcaaaagtttaacggtctgacggtgctgcctcccctccttactgatgaaatgatcgcccagtataccagcgcactcctcgctggcaccataacatccggttggacattcggcgctggtgcagcactgcagataccattcgccatgcaaatggcatatcgtttcaacggtatcggtgtcacacagaatgtcctatatgagaaccagaagctgatcgcaaatcagttcaatagtgccatcggaaaaatccaggatagccttagcagcacaccctcagcccttggcaaactccaggatgtcgtgaaccagaatgcccaggctctcaataccctcgtgaagcagctctcatctaatttcggcgcaatttccagtgtcctcaacgacatcctcagccgcctcgacccccccgaggccgaagtgcagattgacagactgattacaggtcgactccagagcctccagacttacgtgactcagcagctgataagagccgccgagataagggccagcgctaacctggctgccacaaagatgtctgagtgcgtgctgggccagtccaagagagtagacttctgtggcaaaggctaccatctgatgagcttcccacaatccgcacctcacggcgtagtgttcctccacgtgacatatgtaccggctcaggagaagaatttcactaccgctcctgctatatgccatgatggaaaggctcacttcccccgggagggggtgttcgtgtccaacggcacccattggtttgtgactcagcggaatttctacgaaccccagatcataaccactgacaacacatttgtgtccggaaattgtgacgtggtcattggaatagtgaacaacactgtttatgatccactgcagccagaacttgacagctttaaggaggagctcgacaagtacttcaagaatcatacgtcaccagatgtggacctcggagatattagcggtatcaatgccagtgttgtcaatattcagaaggaaatagaccgccttaatgaggtcgccaaaaatctgaacgagagcctcatcgatcttcaggagctgggcaaatatgagcagtacatcaagtggccttggtatatttggcttggcttcatcgccggcctgatcgccatagtaatggtcacaattatgctctctttatggatgtgctccaatggatcgttacaatgcagaatttgcatttaa

SEQ ID NO: 66 - DNA, 3780 bp, Artificial Sequence
  PDI-S Protein GSAS+6P-DNA
atggcgaaaaacgttgcgattttcggcttattgttttctcttcttgtgttggttccttctcagatcttcgcggtgaatcttacgacgcgaacacagttaccacccgcatatacaaatagcttcactcggggtgtttattaccccgacaaagtgttcaggtcctccgtgctccactcaacacaggacctctttcttcctttcttttctaacgtgacatggtttcatgccattcatgtatccggcactaacggtactaagaggttcgataatcctgtgctccctttcaatgacggcgtttactttgcaagcacagagaagagtaacatcatccgaggttggatctttggcactaccctcgattcaaagacgcagagcctcctcattgtgaacaatgccactaacgtggtgatcaaagtttgcgagtttcagttctgcaatgaccctttcttgggggtgtactatcataagaacaacaagtcttggatggaatctgaattccgcgtctatagcagcgccaacaactgcacctttgaatacgtgtcccagcccttccttatggacctggagggaaagcagggaaactttaagaatctgagagagttcgtgtttaaaaatatcgacggctattttaagatctattctaagcacacgcctattaatctcgtgcgcgatcttccacaaggcttcagcgccctggaaccactcgtggacctcccaattggtatcaacatcactagatttcagactctgcttgccctccaccgatcctatctgacacccggagactcctctagcggctggactgccggcgctgccgcttattacgttggttatcttcagccacgcacgttcctgctgaagtataacgagaatggtactattaccgatgccgtggattgtgcccttgaccccctgtccgaaactaagtgcacactcaagtcattcactgtggaaaaaggaatctaccagacaagcaattttcgggtccagcctactgagagcattgtgcgctttcctaacatcacaaatctttgccccttcggagaggttttcaatgctacacggtttgcctccgtgtatgcctggaaccgcaagagaatttccaattgcgtggccgattactccgtgctctacaatagtgcaagctttagcacctttaagtgctatggcgtatcccctactaagcttaacgacttgtgtttcacaaacgtgtatgccgactcctttgtgatacggggcgacgaagttagacagatagcaccaggacagacgggaaagatagctgactacaactataagcttcctgatgacttcactggctgcgttatcgcgtggaattctaacaacctggactcaaaagtcggcggcaactataactatctctatcggctgttccgcaagagtaaccttaagccctttgagagagatataagcactgaaatctaccaggctggcagtacgccctgtaatggcgtggaaggctttaattgttattttccactgcaatcctatggttttcagccaaccaatggcgtgggctaccaaccataccgcgtcgtggtgctctcctttgaactgctccacgctcccgcgactgtctgcggccccaagaagtccacgaaccttgtgaagaataagtgcgttaattttaatttcaacggcctcactggaacaggagtgctcactgagagtaacaagaagttcctgccatttcaacaatttggcagagacatagccgatactactgacgccgttagggacccccagaccctcgagattctcgatataacgccctgctccttcggtggagtttccgtgatcacgccaggcaccaataccagtaaccaggtcgccgtgctgtatcaggatgtcaactgtactgaggtgcccgtagccatccatgcggatcagctcacaccaacttggagggtgtacagcaccggctccaatgtattccagactcgggccggatgccttattggcgccgaacacgtgaacaatagttacgaatgcgatattccaattggcgccggaatctgtgctagctaccagactcagacgaactccccaggcagcgccagcagcgttgccagccagtcaatcatcgcttatacaatgtcacttggagccgaaaactccgtggcttactcaaacaacagcatcgccatccccacaaacttcaccatatccgtgacaactgagattctgccagtgtccatgactaagacgtccgtagattgcactatgtacatatgcggcgacagcacagaatgttctaatctgctgctgcaatatggaagcttctgcactcaactgaacagagcgctcacaggcatcgccgtggagcaggataagaatacccaggaggtgttcgcccaagttaagcagatctacaagaccccacccataaaggatttcggtggattcaattttagtcagatactcccagacccatctaagccatccaagaggagccccatcgaggatcttttgtttaacaaagttactctggccgacgccggtttcatcaagcagtacggagattgcctcggcgacatcgctgctcgtgacctcatctgtgcgcaaaagtttaacggtctgacggtgctgcctcccctccttactgatgaaatgatcgcccagtataccagcgcactcctcgctggcaccataacatccggttggacattcggcgctggtcccgcactgcagataccattccccatgcaaatggcatatcgtttcaacggtatcggtgtcacacagaatgtcctatatgagaaccagaagctgatcgcaaatcagttcaatagtgccatcggaaaaatccaggatagccttagcagcacaccctcagcccttggcaaactccaggatgtcgtgaaccagaatgcccaggctctcaataccctcgtgaagcagctctcatctaatttcggcgcaatttccagtgtcctcaacgacatcctcagccgcctcgacccccccgaggccgaagtgcagattgacagactgattacaggtcgactccagagcctccagacttacgtgactcagcagctgataagagccgccgagataagggccagcgctaacctggctgccacaaagatgtctgagtgcgtgctgggccagtccaagagagtagacttctgtggcaaaggctaccatctgatgagcttcccacaatccgcacctcacggcgtagtgttcctccacgtgacatatgtaccggctcaggagaagaatttcactaccgctcctgctatatgccatgatggaaaggctcacttcccccgggagggggtgttcgtgtccaacggcacccattggtttgtgactcagcggaatttctacgaaccccagatcataaccactgacaacacatttgtgtccggaaattgtgacgtggtcattggaatagtgaacaacactgtttatgatccactgcagccagaacttgacagctttaaggaggagctcgacaagtacttcaagaatcatacgtcaccagatgtggacctcggagatattagcggtatcaatgccagtgttgtcaatattcagaaggaaatagaccgccttaatgaggtcgccaaaaatctgaacgagagcctcatcgatcttcaggagctgggcaaatatgagcagtacatcaagtggccttggtatatttggcttggcttcatcgccggcctgatcgccatagtaatggtcacaattatgctctctttatggatgtgctccaatggatcgttacaatgcagaatttgcatttaa

SEQ ID NO: 67 - DNA, 3780 bp, Artificial Sequence
  PDI-S Protein GSAS+2P+L923F-DNA
atggcgaaaaacgttgcgattttcggcttattgttttctcttcttgtgttggttccttctcagatcttcgcggtgaatcttacgacgcgaacacagttaccacccgcatatacaaatagcttcactcggggtgtttattaccccgacaaagtgttcaggtcctccgtgctccactcaacacaggacctctttcttcctttcttttctaacgtgacatggtttcatgccattcatgtatccggcactaacggtactaagaggttcgataatcctgtgctccctttcaatgacggcgtttactttgcaagcacagagaagagtaacatcatccgaggttggatctttggcactaccctcgattcaaagacgcagagcctcctcattgtgaacaatgccactaacgtggtgatcaaagtttgcgagtttcagttctgcaatgaccctttcttgggggtgtactatcataagaacaacaagtcttggatggaatctgaattccgcgtctatagcagcgccaacaactgcacctttgaatacgtgtcccagcccttccttatggacctggagggaaagcagggaaactttaagaatctgagagagttcgtgtttaaaaatatcgacggctattttaagatctattctaagcacacgcctattaatctcgtgcgcgatcttccacaaggcttcagcgccctggaaccactcgtggacctcccaattggtatcaacatcactagatttcagactctgcttgccctccaccgatcctatctgacacccggagactcctctagcggctggactgccggcgctgccgcttattacgttggttatcttcagccacgcacgttcctgctgaagtataacgagaatggtactattaccgatgccgtggattgtgcccttgaccccctgtccgaaactaagtgcacactcaagtcattcactgtggaaaaaggaatctaccagacaagcaattttcgggtccagcctactgagagcattgtgcgctttcctaacatcacaaatctttgccccttcggagaggttttcaatgctacacggtttgcctccgtgtatgcctggaaccgcaagagaatttccaattgcgtggccgattactccgtgctctacaatagtgcaagctttagcacctttaagtgctatggcgtatcccctactaagcttaacgacttgtgtttcacaaacgtgtatgccgactcctttgtgatacggggcgacgaagttagacagatagcaccaggacagacgggaaagatagctgactacaactataagcttcctgatgacttcactggctgcgttatcgcgtggaattctaacaacctggactcaaaagtcggcggcaactataactatctctatcggctgttccgcaagagtaaccttaagccctttgagagagatataagcactgaaatctaccaggctggcagtacgccctgtaatggcgtggaaggctttaattgttattttccactgcaatcctatggttttcagccaaccaatggcgtgggctaccaaccataccgcgtcgtggtgctctcctttgaactgctccacgctcccgcgactgtctgcggccccaagaagtccacgaaccttgtgaagaataagtgcgttaattttaatttcaacggcctcactggaacaggagtgctcactgagagtaacaagaagttcctgccatttcaacaatttggcagagacatagccgatactactgacgccgttagggacccccagaccctcgagattctcgatataacgccctgctccttcggtggagtttccgtgatcacgccaggcaccaataccagtaaccaggtcgccgtgctgtatcaggatgtcaactgtactgaggtgcccgtagccatccatgcggatcagctcacaccaacttggagggtgtacagcaccggctccaatgtattccagactcgggccggatgccttattggcgccgaacacgtgaacaatagttacgaatgcgatattccaattggcgccggaatctgtgctagctaccagactcagacgaactccccaggcagcgccagcagcgttgccagccagtcaatcatcgcttatacaatgtcacttggagccgaaaactccgtggcttactcaaacaacagcatcgccatccccacaaacttcaccatatccgtgacaactgagattctgccagtgtccatgactaagacgtccgtagattgcactatgtacatatgcggcgacagcacagaatgttctaatctgctgctgcaatatggaagcttctgcactcaactgaacagagcgctcacaggcatcgccgtggagcaggataagaatacccaggaggtgttcgcccaagttaagcagatctacaagaccccacccataaaggatttcggtggattcaattttagtcagatactcccagacccatctaagccatccaagaggagctttatcgaggatcttttgtttaacaaagttactctggccgacgccggtttcatcaagcagtacggagattgcctcggcgacatcgctgctcgtgacctcatctgtgcgcaaaagtttaacggtctgacggtgctgcctcccctccttactgatgaaatgatcgcccagtataccagcgcactcctcgctggcaccataacatccggttggacattcggcgctggtgcagcactgcagataccattcgccatgcaaatggcatatcgtttcaacggtatcggtgtcacacagaatgtcctatatgagaaccagaagctgatcgcaaatcagttcaatagtgccatcggaaaaatccaggatagcttcagcagcacagcctcagcccttggcaaactccaggatgtcgtgaaccagaatgcccaggctctcaataccctcgtgaagcagctctcatctaatttcggcgcaatttccagtgtcctcaacgacatcctcagccgcctcgacccccccgaggccgaagtgcagattgacagactgattacaggtcgactccagagcctccagacttacgtgactcagcagctgataagagccgccgagataagggccagcgctaacctggctgccacaaagatgtctgagtgcgtgctgggccagtccaagagagtagacttctgtggcaaaggctaccatctgatgagcttcccacaatccgcacctcacggcgtagtgttcctccacgtgacatatgtaccggctcaggagaagaatttcactaccgctcctgctatatgccatgatggaaaggctcacttcccccgggagggggtgttcgtgtccaacggcacccattggtttgtgactcagcggaatttctacgaaccccagatcataaccactgacaacacatttgtgtccggaaattgtgacgtggtcattggaatagtgaacaacactgtttatgatccactgcagccagaacttgacagctttaaggaggagctcgacaagtacttcaagaatcatacgtcaccagatgtggacctcggagatattagcggtatcaatgccagtgttgtcaatattcagaaggaaatagaccgccttaatgaggtcgccaaaaatctgaacgagagcctcatcgatcttcaggagctgggcaaatatgagcagtacatcaagtggccttggtatatttggcttggcttcatcgccggcctgatcgccatagtaatggtcacaattatgctctctttatggatgtgctccaatggatcgttacaatgcagaatttgcatttaa

SEQ ID NO: 68 - DNA, 3780 bp, Artificial Sequence
  PDI-S Protein GSAS+4P+L923F-DNA
atggcgaaaaacgttgcgattttcggcttattgttttctcttcttgtgttggttccttctcagatcttcgcggtgaatcttacgacgcgaacacagttaccacccgcatatacaaatagcttcactcggggtgtttattaccccgacaaagtgttcaggtcctccgtgctccactcaacacaggacctctttcttcctttcttttctaacgtgacatggtttcatgccattcatgtatccggcactaacggtactaagaggttcgataatcctgtgctccctttcaatgacggcgtttactttgcaagcacagagaagagtaacatcatccgaggttggatctttggcactaccctcgattcaaagacgcagagcctcctcattgtgaacaatgccactaacgtggtgatcaaagtttgcgagtttcagttctgcaatgaccctttcttgggggtgtactatcataagaacaacaagtcttggatggaatctgaattccgcgtctatagcagcgccaacaactgcacctttgaatacgtgtcccagcccttccttatggacctggagggaaagcagggaaactttaagaatctgagagagttcgtgtttaaaaatatcgacggctattttaagatctattctaagcacacgcctattaatctcgtgcgcgatcttccacaaggcttcagcgccctggaaccactcgtggacctcccaattggtatcaacatcactagatttcagactctgcttgccctccaccgatcctatctgacacccggagactcctctagcggctggactgccggcgctgccgcttattacgttggttatcttcagccacgcacgttcctgctgaagtataacgagaatggtactattaccgatgccgtggattgtgcccttgaccccctgtccgaaactaagtgcacactcaagtcattcactgtggaaaaaggaatctaccagacaagcaattttcgggtccagcctactgagagcattgtgcgctttcctaacatcacaaatctttgccccttcggagaggttttcaatgctacacggtttgcctccgtgtatgcctggaaccgcaagagaatttccaattgcgtggccgattactccgtgctctacaatagtgcaagctttagcacctttaagtgctatggcgtatcccctactaagcttaacgacttgtgtttcacaaacgtgtatgccgactcctttgtgatacggggcgacgaagttagacagatagcaccaggacagacgggaaagatagctgactacaactataagcttcctgatgacttcactggctgcgttatcgcgtggaattctaacaacctggactcaaaagtcggcggcaactataactatctctatcggctgttccgcaagagtaaccttaagccctttgagagagatataagcactgaaatctaccaggctggcagtacgccctgtaatggcgtggaaggctttaattgttattttccactgcaatcctatggttttcagccaaccaatggcgtgggctaccaaccataccgcgtcgtggtgctctcctttgaactgctccacgctcccgcgactgtctgcggccccaagaagtccacgaaccttgtgaagaataagtgcgttaattttaatttcaacggcctcactggaacaggagtgctcactgagagtaacaagaagttcctgccatttcaacaatttggcagagacatagccgatactactgacgccgttagggacccccagaccctcgagattctcgatataacgccctgctccttcggtggagtttccgtgatcacgccaggcaccaataccagtaaccaggtcgccgtgctgtatcaggatgtcaactgtactgaggtgcccgtagccatccatgcggatcagctcacaccaacttggagggtgtacagcaccggctccaatgtattccagactcgggccggatgccttattggcgccgaacacgtgaacaatagttacgaatgcgatattccaattggcgccggaatctgtgctagctaccagactcagacgaactccccaggcagcgccagcagcgttgccagccagtcaatcatcgcttatacaatgtcacttggagccgaaaactccgtggcttactcaaacaacagcatcgccatccccacaaacttcaccatatccgtgacaactgagattctgccagtgtccatgactaagacgtccgtagattgcactatgtacatatgcggcgacagcacagaatgttctaatctgctgctgcaatatggaagcttctgcactcaactgaacagagcgctcacaggcatcgccgtggagcaggataagaatacccaggaggtgttcgcccaagttaagcagatctacaagaccccacccataaaggatttcggtggattcaattttagtcagatactcccagacccatctaagccatccaagaggagccccatcgaggatcttttgtttaacaaagttactctggccgacgccggtttcatcaagcagtacggagattgcctcggcgacatcgctgctcgtgacctcatctgtgcgcaaaagtttaacggtctgacggtgctgcctcccctccttactgatgaaatgatcgcccagtataccagcgcactcctcgctggcaccataacatccggttggacattcggcgctggtgcagcactgcagataccattcgccatgcaaatggcatatcgtttcaacggtatcggtgtcacacagaatgtcctatatgagaaccagaagctgatcgcaaatcagttcaatagtgccatcggaaaaatccaggatagcttcagcagcacaccctcagcccttggcaaactccaggatgtcgtgaaccagaatgcccaggctctcaataccctcgtgaagcagctctcatctaatttcggcgcaatttccagtgtcctcaacgacatcctcagccgcctcgacccccccgaggccgaagtgcagattgacagactgattacaggtcgactccagagcctccagacttacgtgactcagcagctgataagagccgccgagataagggccagcgctaacctggctgccacaaagatgtctgagtgcgtgctgggccagtccaagagagtagacttctgtggcaaaggctaccatctgatgagcttcccacaatccgcacctcacggcgtagtgttcctccacgtgacatatgtaccggctcaggagaagaatttcactaccgctcctgctatatgccatgatggaaaggctcacttcccccgggagggggtgttcgtgtccaacggcacccattggtttgtgactcagcggaatttctacgaaccccagatcataaccactgacaacacatttgtgtccggaaattgtgacgtggtcattggaatagtgaacaacactgtttatgatccactgcagccagaacttgacagctttaaggaggagctcgacaagtacttcaagaatcatacgtcaccagatgtggacctcggagatattagcggtatcaatgccagtgttgtcaatattcagaaggaaatagaccgccttaatgaggtcgccaaaaatctgaacgagagcctcatcgatcttcaggagctgggcaaatatgagcagtacatcaagtggccttggtatatttggcttggcttcatcgccggcctgatcgccatagtaatggtcacaattatgctctctttatggatgtgctccaatggatcgttacaatgcagaatttgcatttaa

SEQ ID NO: 69 - DNA, 3780 bp, Artificial Sequence
  PDI-S Protein GSAS+6P+L923F-DNA
atggcgaaaaacgttgcgattttcggcttattgttttctcttcttgtgttggttccttctcagatcttcgcggtgaatcttacgacgcgaacacagttaccacccgcatatacaaatagcttcactcggggtgtttattaccccgacaaagtgttcaggtcctccgtgctccactcaacacaggacctctttcttcctttcttttctaacgtgacatggtttcatgccattcatgtatccggcactaacggtactaagaggttcgataatcctgtgctccctttcaatgacggcgtttactttgcaagcacagagaagagtaacatcatccgaggttggatctttggcactaccctcgattcaaagacgcagagcctcctcattgtgaacaatgccactaacgtggtgatcaaagtttgcgagtttcagttctgcaatgaccctttcttgggggtgtactatcataagaacaacaagtcttggatggaatctgaattccgcgtctatagcagcgccaacaactgcacctttgaatacgtgtcccagcccttccttatggacctggagggaaagcagggaaactttaagaatctgagagagttcgtgtttaaaaatatcgacggctattttaagatctattctaagcacacgcctattaatctcgtgcgcgatcttccacaaggcttcagcgccctggaaccactcgtggacctcccaattggtatcaacatcactagatttcagactctgcttgccctccaccgatcctatctgacacccggagactcctctagcggctggactgccggcgctgccgcttattacgttggttatcttcagccacgcacgttcctgctgaagtataacgagaatggtactattaccgatgccgtggattgtgcccttgaccccctgtccgaaactaagtgcacactcaagtcattcactgtggaaaaaggaatctaccagacaagcaattttcgggtccagcctactgagagcattgtgcgctttcctaacatcacaaatctttgccccttcggagaggttttcaatgctacacggtttgcctccgtgtatgcctggaaccgcaagagaatttccaattgcgtggccgattactccgtgctctacaatagtgcaagctttagcacctttaagtgctatggcgtatcccctactaagcttaacgacttgtgtttcacaaacgtgtatgccgactcctttgtgatacggggcgacgaagttagacagatagcaccaggacagacgggaaagatagctgactacaactataagcttcctgatgacttcactggctgcgttatcgcgtggaattctaacaacctggactcaaaagtcggcggcaactataactatctctatcggctgttccgcaagagtaaccttaagccctttgagagagatataagcactgaaatctaccaggctggcagtacgccctgtaatggcgtggaaggctttaattgttattttccactgcaatcctatggttttcagccaaccaatggcgtgggctaccaaccataccgcgtcgtggtgctctcctttgaactgctccacgctcccgcgactgtctgcggccccaagaagtccacgaaccttgtgaagaataagtgcgttaattttaatttcaacggcctcactggaacaggagtgctcactgagagtaacaagaagttcctgccatttcaacaatttggcagagacatagccgatactactgacgccgttagggacccccagaccctcgagattctcgatataacgccctgctccttcggtggagtttccgtgatcacgccaggcaccaataccagtaaccaggtcgccgtgctgtatcaggatgtcaactgtactgaggtgcccgtagccatccatgcggatcagctcacaccaacttggagggtgtacagcaccggctccaatgtattccagactcgggccggatgccttattggcgccgaacacgtgaacaatagttacgaatgcgatattccaattggcgccggaatctgtgctagctaccagactcagacgaactccccaggcagcgccagcagcgttgccagccagtcaatcatcgcttatacaatgtcacttggagccgaaaactccgtggcttactcaaacaacagcatcgccatccccacaaacttcaccatatccgtgacaactgagattctgccagtgtccatgactaagacgtccgtagattgcactatgtacatatgcggcgacagcacagaatgttctaatctgctgctgcaatatggaagcttctgcactcaactgaacagagcgctcacaggcatcgccgtggagcaggataagaatacccaggaggtgttcgcccaagttaagcagatctacaagaccccacccataaaggatttcggtggattcaattttagtcagatactcccagacccatctaagccatccaagaggagccccatcgaggatcttttgtttaacaaagttactctggccgacgccggtttcatcaagcagtacggagattgcctcggcgacatcgctgctcgtgacctcatctgtgcgcaaaagtttaacggtctgacggtgctgcctcccctccttactgatgaaatgatcgcccagtataccagcgcactcctcgctggcaccataacatccggttggacattcggcgctggtcccgcactgcagataccattccccatgcaaatggcatatcgtttcaacggtatcggtgtcacacagaatgtcctatatgagaaccagaagctgatcgcaaatcagttcaatagtgccatcggaaaaatccaggatagcttcagcagcacaccctcagcccttggcaaactccaggatgtcgtgaaccagaatgcccaggctctcaataccctcgtgaagcagctctcatctaatttcggcgcaatttccagtgtcctcaacgacatcctcagccgcctcgacccccccgaggccgaagtgcagattgacagactgattacaggtcgactccagagcctccagacttacgtgactcagcagctgataagagccgccgagataagggccagcgctaacctggctgccacaaagatgtctgagtgcgtgctgggccagtccaagagagtagacttctgtggcaaaggctaccatctgatgagcttcccacaatccgcacctcacggcgtagtgttcctccacgtgacatatgtaccggctcaggagaagaatttcactaccgctcctgctatatgccatgatggaaaggctcacttcccccgggagggggtgttcgtgtccaacggcacccattggtttgtgactcagcggaatttctacgaaccccagatcataaccactgacaacacatttgtgtccggaaattgtgacgtggtcattggaatagtgaacaacactgtttatgatccactgcagccagaacttgacagctttaaggaggagctcgacaagtacttcaagaatcatacgtcaccagatgtggacctcggagatattagcggtatcaatgccagtgttgtcaatattcagaaggaaatagaccgccttaatgaggtcgccaaaaatctgaacgagagcctcatcgatcttcaggagctgggcaaatatgagcagtacatcaagtggccttggtatatttggcttggcttcatcgccggcctgatcgccatagtaatggtcacaattatgctctctttatggatgtgctccaatggatcgttacaatgcagaatttgcatttaa

SEQ ID NO: 70 - DNA, 3789 bp, Artificial Sequence
  PDI-Modified S protein with H5i Hemagglutinin CT (V1) DNA
atggcgaaaaacgttgcgattttcggcttattgttttctcttcttgtgttggttccttctcagatcttcgcggtgaatcttacgacgcgaacacagttaccacccgcatatacaaatagcttcactcggggtgtttattaccccgacaaagtgttcaggtcctccgtgctccactcaacacaggacctctttcttcctttcttttctaacgtgacatggtttcatgccattcatgtatccggcactaacggtactaagaggttcgataatcctgtgctccctttcaatgacggcgtttactttgcaagcacagagaagagtaacatcatccgaggttggatctttggcactaccctcgattcaaagacgcagagcctcctcattgtgaacaatgccactaacgtggtgatcaaagtttgcgagtttcagttctgcaatgaccctttcttgggggtgtactatcataagaacaacaagtcttggatggaatctgaattccgcgtctatagcagcgccaacaactgcacctttgaatacgtgtcccagcccttccttatggacctggagggaaagcagggaaactttaagaatctgagagagttcgtgtttaaaaatatcgacggctattttaagatctattctaagcacacgcctattaatctcgtgcgcgatcttccacaaggcttcagcgccctggaaccactcgtggacctcccaattggtatcaacatcactagatttcagactctgcttgccctccaccgatcctatctgacacccggagactcctctagcggctggactgccggcgctgccgcttattacgttggttatcttcagccacgcacgttcctgctgaagtataacgagaatggtactattaccgatgccgtggattgtgcccttgaccccctgtccgaaactaagtgcacactcaagtcattcactgtggaaaaaggaatctaccagacaagcaattttcgggtccagcctactgagagcattgtgcgctttcctaacatcacaaatctttgccccttcggagaggttttcaatgctacacggtttgcctccgtgtatgcctggaaccgcaagagaatttccaattgcgtggccgattactccgtgctctacaatagtgcaagctttagcacctttaagtgctatggcgtatcccctactaagcttaacgacttgtgtttcacaaacgtgtatgccgactcctttgtgatacggggcgacgaagttagacagatagcaccaggacagacgggaaagatagctgactacaactataagcttcctgatgacttcactggctgcgttatcgcgtggaattctaacaacctggactcaaaagtcggcggcaactataactatctctatcggctgttccgcaagagtaaccttaagccctttgagagagatataagcactgaaatctaccaggctggcagtacgccctgtaatggcgtggaaggctttaattgttattttccactgcaatcctatggttttcagccaaccaatggcgtgggctaccaaccataccgcgtcgtggtgctctcctttgaactgctccacgctcccgcgactgtctgcggccccaagaagtccacgaaccttgtgaagaataagtgcgttaattttaatttcaacggcctcactggaacaggagtgctcactgagagtaacaagaagttcctgccatttcaacaatttggcagagacatagccgatactactgacgccgttagggacccccagaccctcgagattctcgatataacgccctgctccttcggtggagtttccgtgatcacgccaggcaccaataccagtaaccaggtcgccgtgctgtatcaggatgtcaactgtactgaggtgcccgtagccatccatgcggatcagctcacaccaacttggagggtgtacagcaccggctccaatgtattccagactcgggccggatgccttattggcgccgaacacgtgaacaatagttacgaatgcgatattccaattggcgccggaatctgtgctagctaccagactcagacgaactccccaggcagcgccagcagcgttgccagccagtcaatcatcgcttatacaatgtcacttggagccgaaaactccgtggcttactcaaacaacagcatcgccatccccacaaacttcaccatatccgtgacaactgagattctgccagtgtccatgactaagacgtccgtagattgcactatgtacatatgcggcgacagcacagaatgttctaatctgctgctgcaatatggaagcttctgcactcaactgaacagagcgctcacaggcatcgccgtggagcaggataagaatacccaggaggtgttcgcccaagttaagcagatctacaagaccccacccataaaggatttcggtggattcaattttagtcagatactcccagacccatctaagccatccaagaggagctttatcgaggatcttttgtttaacaaagttactctggccgacgccggtttcatcaagcagtacggagattgcctcggcgacatcgctgctcgtgacctcatctgtgcgcaaaagtttaacggtctgacggtgctgcctcccctccttactgatgaaatgatcgcccagtataccagcgcactcctcgctggcaccataacatccggttggacattcggcgctggtgcagcactgcagataccattcgccatgcaaatggcatatcgtttcaacggtatcggtgtcacacagaatgtcctatatgagaaccagaagctgatcgcaaatcagttcaatagtgccatcggaaaaatccaggatagccttagcagcacagcctcagcccttggcaaactccaggatgtcgtgaaccagaatgcccaggctctcaataccctcgtgaagcagctctcatctaatttcggcgcaatttccagtgtcctcaacgacatcctcagccgcctcgacccccccgaggccgaagtgcagattgacagactgattacaggtcgactccagagcctccagacttacgtgactcagcagctgataagagccgccgagataagggccagcgctaacctggctgccacaaagatgtctgagtgcgtgctgggccagtccaagagagtagacttctgtggcaaaggctaccatctgatgagcttcccacaatccgcacctcacggcgtagtgttcctccacgtgacatatgtaccggctcaggagaagaatttcactaccgctcctgctatatgccatgatggaaaggctcacttcccccgggagggggtgttcgtgtccaacggcacccattggtttgtgactcagcggaatttctacgaaccccagatcataaccactgacaacacatttgtgtccggaaattgtgacgtggtcattggaatagtgaacaacactgtttatgatccactgcagccagaacttgacagctttaaggaggagctcgacaagtacttcaagaatcatacgtcaccagatgtggacctcggagatattagcggtatcaatgccagtgttgtcaatattcagaaggaaatagaccgccttaatgaggtcgccaaaaatctgaacgagagcctcatcgatcttcaggagctgggcaaatatgagcagtacatcaagtggccttggtatatttggcttggcttcatcgccggcctgatcgccatagtaatggtcacaattatgatggccggcctctctttatggatgtgctccaatggatcgttacaatgcagaatttgcatttaa

SEQ ID NO: 71 - DNA, 3786 bp, Artificial Sequence
  PDI-Modified S protein with H5i Hemagglutinin CT (V2) DNA
atggcgaaaaacgttgcgattttcggcttattgttttctcttcttgtgttggttccttctcagatcttcgcggtgaatcttacgacgcgaacacagttaccacccgcatatacaaatagcttcactcggggtgtttattaccccgacaaagtgttcaggtcctccgtgctccactcaacacaggacctctttcttcctttcttttctaacgtgacatggtttcatgccattcatgtatccggcactaacggtactaagaggttcgataatcctgtgctccctttcaatgacggcgtttactttgcaagcacagagaagagtaacatcatccgaggttggatctttggcactaccctcgattcaaagacgcagagcctcctcattgtgaacaatgccactaacgtggtgatcaaagtttgcgagtttcagttctgcaatgaccctttcttgggggtgtactatcataagaacaacaagtcttggatggaatctgaattccgcgtctatagcagcgccaacaactgcacctttgaatacgtgtcccagcccttccttatggacctggagggaaagcagggaaactttaagaatctgagagagttcgtgtttaaaaatatcgacggctattttaagatctattctaagcacacgcctattaatctcgtgcgcgatcttccacaaggcttcagcgccctggaaccactcgtggacctcccaattggtatcaacatcactagatttcagactctgcttgccctccaccgatcctatctgacacccggagactcctctagcggctggactgccggcgctgccgcttattacgttggttatcttcagccacgcacgttcctgctgaagtataacgagaatggtactattaccgatgccgtggattgtgcccttgaccccctgtccgaaactaagtgcacactcaagtcattcactgtggaaaaaggaatctaccagacaagcaattttcgggtccagcctactgagagcattgtgcgctttcctaacatcacaaatctttgccccttcggagaggttttcaatgctacacggtttgcctccgtgtatgcctggaaccgcaagagaatttccaattgcgtggccgattactccgtgctctacaatagtgcaagctttagcacctttaagtgctatggcgtatcccctactaagcttaacgacttgtgtttcacaaacgtgtatgccgactcctttgtgatacggggcgacgaagttagacagatagcaccaggacagacgggaaagatagctgactacaactataagcttcctgatgacttcactggctgcgttatcgcgtggaattctaacaacctggactcaaaagtcggcggcaactataactatctctatcggctgttccgcaagagtaaccttaagccctttgagagagatataagcactgaaatctaccaggctggcagtacgccctgtaatggcgtggaaggctttaattgttattttccactgcaatcctatggttttcagccaaccaatggcgtgggctaccaaccataccgcgtcgtggtgctctcctttgaactgctccacgctcccgcgactgtctgcggccccaagaagtccacgaaccttgtgaagaataagtgcgttaattttaatttcaacggcctcactggaacaggagtgctcactgagagtaacaagaagttcctgccatttcaacaatttggcagagacatagccgatactactgacgccgttagggacccccagaccctcgagattctcgatataacgccctgctccttcggtggagtttccgtgatcacgccaggcaccaataccagtaaccaggtcgccgtgctgtatcaggatgtcaactgtactgaggtgcccgtagccatccatgcggatcagctcacaccaacttggagggtgtacagcaccggctccaatgtattccagactcgggccggatgccttattggcgccgaacacgtgaacaatagttacgaatgcgatattccaattggcgccggaatctgtgctagctaccagactcagacgaactccccaggcagcgccagcagcgttgccagccagtcaatcatcgcttatacaatgtcacttggagccgaaaactccgtggcttactcaaacaacagcatcgccatccccacaaacttcaccatatccgtgacaactgagattctgccagtgtccatgactaagacgtccgtagattgcactatgtacatatgcggcgacagcacagaatgttctaatctgctgctgcaatatggaagcttctgcactcaactgaacagagcgctcacaggcatcgccgtggagcaggataagaatacccaggaggtgttcgcccaagttaagcagatctacaagaccccacccataaaggatttcggtggattcaattttagtcagatactcccagacccatctaagccatccaagaggagctttatcgaggatcttttgtttaacaaagttactctggccgacgccggtttcatcaagcagtacggagattgcctcggcgacatcgctgctcgtgacctcatctgtgcgcaaaagtttaacggtctgacggtgctgcctcccctccttactgatgaaatgatcgcccagtataccagcgcactcctcgctggcaccataacatccggttggacattcggcgctggtgcagcactgcagataccattcgccatgcaaatggcatatcgtttcaacggtatcggtgtcacacagaatgtcctatatgagaaccagaagctgatcgcaaatcagttcaatagtgccatcggaaaaatccaggatagccttagcagcacagcctcagcccttggcaaactccaggatgtcgtgaaccagaatgcccaggctctcaataccctcgtgaagcagctctcatctaatttcggcgcaatttccagtgtcctcaacgacatcctcagccgcctcgacccccccgaggccgaagtgcagattgacagactgattacaggtcgactccagagcctccagacttacgtgactcagcagctgataagagccgccgagataagggccagcgctaacctggctgccacaaagatgtctgagtgcgtgctgggccagtccaagagagtagacttctgtggcaaaggctaccatctgatgagcttcccacaatccgcacctcacggcgtagtgttcctccacgtgacatatgtaccggctcaggagaagaatttcactaccgctcctgctatatgccatgatggaaaggctcacttcccccgggagggggtgttcgtgtccaacggcacccattggtttgtgactcagcggaatttctacgaaccccagatcataaccactgacaacacatttgtgtccggaaattgtgacgtggtcattggaatagtgaacaacactgtttatgatccactgcagccagaacttgacagctttaaggaggagctcgacaagtacttcaagaatcatacgtcaccagatgtggacctcggagatattagcggtatcaatgccagtgttgtcaatattcagaaggaaatagaccgccttaatgaggtcgccaaaaatctgaacgagagcctcatcgatcttcaggagctgggcaaatatgagcagtacatcaagtggccttggtatatttggcttggcttcatcgccggcctgatcgccatagtaatggtcacaattatggccggcctctctttatggatgtgctccaatggatcgttacaatgcagaatttgcatttaa

SEQ ID NO: 72 - DNA, 3777 bp, Artificial Sequence
  PDI-Modified S protein with H5i Hemagglutinin CT (V3) DNA
atggcgaaaaacgttgcgattttcggcttattgttttctcttcttgtgttggttccttctcagatcttcgcggtgaatcttacgacgcgaacacagttaccacccgcatatacaaatagcttcactcggggtgtttattaccccgacaaagtgttcaggtcctccgtgctccactcaacacaggacctctttcttcctttcttttctaacgtgacatggtttcatgccattcatgtatccggcactaacggtactaagaggttcgataatcctgtgctccctttcaatgacggcgtttactttgcaagcacagagaagagtaacatcatccgaggttggatctttggcactaccctcgattcaaagacgcagagcctcctcattgtgaacaatgccactaacgtggtgatcaaagtttgcgagtttcagttctgcaatgaccctttcttgggggtgtactatcataagaacaacaagtcttggatggaatctgaattccgcgtctatagcagcgccaacaactgcacctttgaatacgtgtcccagcccttccttatggacctggagggaaagcagggaaactttaagaatctgagagagttcgtgtttaaaaatatcgacggctattttaagatctattctaagcacacgcctattaatctcgtgcgcgatcttccacaaggcttcagcgccctggaaccactcgtggacctcccaattggtatcaacatcactagatttcagactctgcttgccctccaccgatcctatctgacacccggagactcctctagcggctggactgccggcgctgccgcttattacgttggttatcttcagccacgcacgttcctgctgaagtataacgagaatggtactattaccgatgccgtggattgtgcccttgaccccctgtccgaaactaagtgcacactcaagtcattcactgtggaaaaaggaatctaccagacaagcaattttcgggtccagcctactgagagcattgtgcgctttcctaacatcacaaatctttgccccttcggagaggttttcaatgctacacggtttgcctccgtgtatgcctggaaccgcaagagaatttccaattgcgtggccgattactccgtgctctacaatagtgcaagctttagcacctttaagtgctatggcgtatcccctactaagcttaacgacttgtgtttcacaaacgtgtatgccgactcctttgtgatacggggcgacgaagttagacagatagcaccaggacagacgggaaagatagctgactacaactataagcttcctgatgacttcactggctgcgttatcgcgtggaattctaacaacctggactcaaaagtcggcggcaactataactatctctatcggctgttccgcaagagtaaccttaagccctttgagagagatataagcactgaaatctaccaggctggcagtacgccctgtaatggcgtggaaggctttaattgttattttccactgcaatcctatggttttcagccaaccaatggcgtgggctaccaaccataccgcgtcgtggtgctctcctttgaactgctccacgctcccgcgactgtctgcggccccaagaagtccacgaaccttgtgaagaataagtgcgttaattttaatttcaacggcctcactggaacaggagtgctcactgagagtaacaagaagttcctgccatttcaacaatttggcagagacatagccgatactactgacgccgttagggacccccagaccctcgagattctcgatataacgccctgctccttcggtggagtttccgtgatcacgccaggcaccaataccagtaaccaggtcgccgtgctgtatcaggatgtcaactgtactgaggtgcccgtagccatccatgcggatcagctcacaccaacttggagggtgtacagcaccggctccaatgtattccagactcgggccggatgccttattggcgccgaacacgtgaacaatagttacgaatgcgatattccaattggcgccggaatctgtgctagctaccagactcagacgaactccccaggcagcgccagcagcgttgccagccagtcaatcatcgcttatacaatgtcacttggagccgaaaactccgtggcttactcaaacaacagcatcgccatccccacaaacttcaccatatccgtgacaactgagattctgccagtgtccatgactaagacgtccgtagattgcactatgtacatatgcggcgacagcacagaatgttctaatctgctgctgcaatatggaagcttctgcactcaactgaacagagcgctcacaggcatcgccgtggagcaggataagaatacccaggaggtgttcgcccaagttaagcagatctacaagaccccacccataaaggatttcggtggattcaattttagtcagatactcccagacccatctaagccatccaagaggagctttatcgaggatcttttgtttaacaaagttactctggccgacgccggtttcatcaagcagtacggagattgcctcggcgacatcgctgctcgtgacctcatctgtgcgcaaaagtttaacggtctgacggtgctgcctcccctccttactgatgaaatgatcgcccagtataccagcgcactcctcgctggcaccataacatccggttggacattcggcgctggtgcagcactgcagataccattcgccatgcaaatggcatatcgtttcaacggtatcggtgtcacacagaatgtcctatatgagaaccagaagctgatcgcaaatcagttcaatagtgccatcggaaaaatccaggatagccttagcagcacagcctcagcccttggcaaactccaggatgtcgtgaaccagaatgcccaggctctcaataccctcgtgaagcagctctcatctaatttcggcgcaatttccagtgtcctcaacgacatcctcagccgcctcgacccccccgaggccgaagtgcagattgacagactgattacaggtcgactccagagcctccagacttacgtgactcagcagctgataagagccgccgagataagggccagcgctaacctggctgccacaaagatgtctgagtgcgtgctgggccagtccaagagagtagacttctgtggcaaaggctaccatctgatgagcttcccacaatccgcacctcacggcgtagtgttcctccacgtgacatatgtaccggctcaggagaagaatttcactaccgctcctgctatatgccatgatggaaaggctcacttcccccgggagggggtgttcgtgtccaacggcacccattggtttgtgactcagcggaatttctacgaaccccagatcataaccactgacaacacatttgtgtccggaaattgtgacgtggtcattggaatagtgaacaacactgtttatgatccactgcagccagaacttgacagctttaaggaggagctcgacaagtacttcaagaatcatacgtcaccagatgtggacctcggagatattagcggtatcaatgccagtgttgtcaatattcagaaggaaatagaccgccttaatgaggtcgccaaaaatctgaacgagagcctcatcgatcttcaggagctgggcaaatatgagcagtacatcaagtggccttggtatatttggcttggcttcatcgccggcctgatcgccatagtaatggtcacaattatgctctgctgcatgtgctccaatggatcgttacaatgcagaatttgcatttaa

SEQ ID NO: 73 - DNA, 3771 bp, Artificial Sequence
  PDI-Modified S protein with H5i Hemagglutinin CT (V4) DNA
atggcgaaaaacgttgcgattttcggcttattgttttctcttcttgtgttggttccttctcagatcttcgcggtgaatcttacgacgcgaacacagttaccacccgcatatacaaatagcttcactcggggtgtttattaccccgacaaagtgttcaggtcctccgtgctccactcaacacaggacctctttcttcctttcttttctaacgtgacatggtttcatgccattcatgtatccggcactaacggtactaagaggttcgataatcctgtgctccctttcaatgacggcgtttactttgcaagcacagagaagagtaacatcatccgaggttggatctttggcactaccctcgattcaaagacgcagagcctcctcattgtgaacaatgccactaacgtggtgatcaaagtttgcgagtttcagttctgcaatgaccctttcttgggggtgtactatcataagaacaacaagtcttggatggaatctgaattccgcgtctatagcagcgccaacaactgcacctttgaatacgtgtcccagcccttccttatggacctggagggaaagcagggaaactttaagaatctgagagagttcgtgtttaaaaatatcgacggctattttaagatctattctaagcacacgcctattaatctcgtgcgcgatcttccacaaggcttcagcgccctggaaccactcgtggacctcccaattggtatcaacatcactagatttcagactctgcttgccctccaccgatcctatctgacacccggagactcctctagcggctggactgccggcgctgccgcttattacgttggttatcttcagccacgcacgttcctgctgaagtataacgagaatggtactattaccgatgccgtggattgtgcccttgaccccctgtccgaaactaagtgcacactcaagtcattcactgtggaaaaaggaatctaccagacaagcaattttcgggtccagcctactgagagcattgtgcgctttcctaacatcacaaatctttgccccttcggagaggttttcaatgctacacggtttgcctccgtgtatgcctggaaccgcaagagaatttccaattgcgtggccgattactccgtgctctacaatagtgcaagctttagcacctttaagtgctatggcgtatcccctactaagcttaacgacttgtgtttcacaaacgtgtatgccgactcctttgtgatacggggcgacgaagttagacagatagcaccaggacagacgggaaagatagctgactacaactataagcttcctgatgacttcactggctgcgttatcgcgtggaattctaacaacctggactcaaaagtcggcggcaactataactatctctatcggctgttccgcaagagtaaccttaagccctttgagagagatataagcactgaaatctaccaggctggcagtacgccctgtaatggcgtggaaggctttaattgttattttccactgcaatcctatggttttcagccaaccaatggcgtgggctaccaaccataccgcgtcgtggtgctctcctttgaactgctccacgctcccgcgactgtctgcggccccaagaagtccacgaaccttgtgaagaataagtgcgttaattttaatttcaacggcctcactggaacaggagtgctcactgagagtaacaagaagttcctgccatttcaacaatttggcagagacatagccgatactactgacgccgttagggacccccagaccctcgagattctcgatataacgccctgctccttcggtggagtttccgtgatcacgccaggcaccaataccagtaaccaggtcgccgtgctgtatcaggatgtcaactgtactgaggtgcccgtagccatccatgcggatcagctcacaccaacttggagggtgtacagcaccggctccaatgtattccagactcgggccggatgccttattggcgccgaacacgtgaacaatagttacgaatgcgatattccaattggcgccggaatctgtgctagctaccagactcagacgaactccccaggcagcgccagcagcgttgccagccagtcaatcatcgcttatacaatgtcacttggagccgaaaactccgtggcttactcaaacaacagcatcgccatccccacaaacttcaccatatccgtgacaactgagattctgccagtgtccatgactaagacgtccgtagattgcactatgtacatatgcggcgacagcacagaatgttctaatctgctgctgcaatatggaagcttctgcactcaactgaacagagcgctcacaggcatcgccgtggagcaggataagaatacccaggaggtgttcgcccaagttaagcagatctacaagaccccacccataaaggatttcggtggattcaattttagtcagatactcccagacccatctaagccatccaagaggagctttatcgaggatcttttgtttaacaaagttactctggccgacgccggtttcatcaagcagtacggagattgcctcggcgacatcgctgctcgtgacctcatctgtgcgcaaaagtttaacggtctgacggtgctgcctcccctccttactgatgaaatgatcgcccagtataccagcgcactcctcgctggcaccataacatccggttggacattcggcgctggtgcagcactgcagataccattcgccatgcaaatggcatatcgtttcaacggtatcggtgtcacacagaatgtcctatatgagaaccagaagctgatcgcaaatcagttcaatagtgccatcggaaaaatccaggatagccttagcagcacagcctcagcccttggcaaactccaggatgtcgtgaaccagaatgcccaggctctcaataccctcgtgaagcagctctcatctaatttcggcgcaatttccagtgtcctcaacgacatcctcagccgcctcgacccccccgaggccgaagtgcagattgacagactgattacaggtcgactccagagcctccagacttacgtgactcagcagctgataagagccgccgagataagggccagcgctaacctggctgccacaaagatgtctgagtgcgtgctgggccagtccaagagagtagacttctgtggcaaaggctaccatctgatgagcttcccacaatccgcacctcacggcgtagtgttcctccacgtgacatatgtaccggctcaggagaagaatttcactaccgctcctgctatatgccatgatggaaaggctcacttcccccgggagggggtgttcgtgtccaacggcacccattggtttgtgactcagcggaatttctacgaaccccagatcataaccactgacaacacatttgtgtccggaaattgtgacgtggtcattggaatagtgaacaacactgtttatgatccactgcagccagaacttgacagctttaaggaggagctcgacaagtacttcaagaatcatacgtcaccagatgtggacctcggagatattagcggtatcaatgccagtgttgtcaatattcagaaggaaatagaccgccttaatgaggtcgccaaaaatctgaacgagagcctcatcgatcttcaggagctgggcaaatatgagcagtacatcaagtggccttggtatatttggcttggcttcatcgccggcctgatcgccatagtaatggtcacaattatgctctgctgctccaatggatcgttacaatgcagaatttgcatttaa

SEQ ID NO: 74 - DNA, 3780 bp, Artificial Sequence
  PDI-S-protein+H1 Cal DNA
atggcgaaaaacgttgcgattttcggcttattgttttctcttcttgtgttggttccttctcagatcttcgcggtgaatcttacgacgcgaacacagttaccacccgcatatacaaatagcttcactcggggtgtttattaccccgacaaagtgttcaggtcctccgtgctccactcaacacaggacctctttcttcctttcttttctaacgtgacatggtttcatgccattcatgtatccggcactaacggtactaagaggttcgataatcctgtgctccctttcaatgacggcgtttactttgcaagcacagagaagagtaacatcatccgaggttggatctttggcactaccctcgattcaaagacgcagagcctcctcattgtgaacaatgccactaacgtggtgatcaaagtttgcgagtttcagttctgcaatgaccctttcttgggggtgtactatcataagaacaacaagtcttggatggaatctgaattccgcgtctatagcagcgccaacaactgcacctttgaatacgtgtcccagcccttccttatggacctggagggaaagcagggaaactttaagaatctgagagagttcgtgtttaaaaatatcgacggctattttaagatctattctaagcacacgcctattaatctcgtgcgcgatcttccacaaggcttcagcgccctggaaccactcgtggacctcccaattggtatcaacatcactagatttcagactctgcttgccctccaccgatcctatctgacacccggagactcctctagcggctggactgccggcgctgccgcttattacgttggttatcttcagccacgcacgttcctgctgaagtataacgagaatggtactattaccgatgccgtggattgtgcccttgaccccctgtccgaaactaagtgcacactcaagtcattcactgtggaaaaaggaatctaccagacaagcaattttcgggtccagcctactgagagcattgtgcgctttcctaacatcacaaatctttgccccttcggagaggttttcaatgctacacggtttgcctccgtgtatgcctggaaccgcaagagaatttccaattgcgtggccgattactccgtgctctacaatagtgcaagctttagcacctttaagtgctatggcgtatcccctactaagcttaacgacttgtgtttcacaaacgtgtatgccgactcctttgtgatacggggcgacgaagttagacagatagcaccaggacagacgggaaagatagctgactacaactataagcttcctgatgacttcactggctgcgttatcgcgtggaattctaacaacctggactcaaaagtcggcggcaactataactatctctatcggctgttccgcaagagtaaccttaagccctttgagagagatataagcactgaaatctaccaggctggcagtacgccctgtaatggcgtggaaggctttaattgttattttccactgcaatcctatggttttcagccaaccaatggcgtgggctaccaaccataccgcgtcgtggtgctctcctttgaactgctccacgctcccgcgactgtctgcggccccaagaagtccacgaaccttgtgaagaataagtgcgttaattttaatttcaacggcctcactggaacaggagtgctcactgagagtaacaagaagttcctgccatttcaacaatttggcagagacatagccgatactactgacgccgttagggacccccagaccctcgagattctcgatataacgccctgctccttcggtggagtttccgtgatcacgccaggcaccaataccagtaaccaggtcgccgtgctgtatcaggatgtcaactgtactgaggtgcccgtagccatccatgcggatcagctcacaccaacttggagggtgtacagcaccggctccaatgtattccagactcgggccggatgccttattggcgccgaacacgtgaacaatagttacgaatgcgatattccaattggcgccggaatctgtgctagctaccagactcagacgaactccccaggcagcgccagcagcgttgccagccagtcaatcatcgcttatacaatgtcacttggagccgaaaactccgtggcttactcaaacaacagcatcgccatccccacaaacttcaccatatccgtgacaactgagattctgccagtgtccatgactaagacgtccgtagattgcactatgtacatatgcggcgacagcacagaatgttctaatctgctgctgcaatatggaagcttctgcactcaactgaacagagcgctcacaggcatcgccgtggagcaggataagaatacccaggaggtgttcgcccaagttaagcagatctacaagaccccacccataaaggatttcggtggattcaattttagtcagatactcccagacccatctaagccatccaagaggagctttatcgaggatcttttgtttaacaaagttactctggccgacgccggtttcatcaagcagtacggagattgcctcggcgacatcgctgctcgtgacctcatctgtgcgcaaaagtttaacggtctgacggtgctgcctcccctccttactgatgaaatgatcgcccagtataccagcgcactcctcgctggcaccataacatccggttggacattcggcgctggtgcagcactgcagataccattcgccatgcaaatggcatatcgtttcaacggtatcggtgtcacacagaatgtcctatatgagaaccagaagctgatcgcaaatcagttcaatagtgccatcggaaaaatccaggatagccttagcagcacagcctcagcccttggcaaactccaggatgtcgtgaaccagaatgcccaggctctcaataccctcgtgaagcagctctcatctaatttcggcgcaatttccagtgtcctcaacgacatcctcagccgcctcgacccccccgaggccgaagtgcagattgacagactgattacaggtcgactccagagcctccagacttacgtgactcagcagctgataagagccgccgagataagggccagcgctaacctggctgccacaaagatgtctgagtgcgtgctgggccagtccaagagagtagacttctgtggcaaaggctaccatctgatgagcttcccacaatccgcacctcacggcgtagtgttcctccacgtgacatatgtaccggctcaggagaagaatttcactaccgctcctgctatatgccatgatggaaaggctcacttcccccgggagggggtgttcgtgtccaacggcacccattggtttgtgactcagcggaatttctacgaaccccagatcataaccactgacaacacatttgtgtccggaaattgtgacgtggtcattggaatagtgaacaacactgtttatgatccactgcagccagaacttgacagctttaaggaggagctcgacaagtacttcaagaatcatacgtcaccagatgtggacctcggagatattagcggtatcaatgccagtgttgtcaatattcagaaggaaatagaccgccttaatgaggtcgccaaaaatctgaacgagagcctcatcgatcttcaggagctgggcaaatatgagcagtacatcaagtggccttggtatatttggcttggcttcatcgccggcctgatcgccatagtaatggtcacaattatgctcagcttctggatgtgctctaatgggtctctacagtgtagaatatgtatttaa

SEQ ID NO: 75 - DNA, 3777 bp, Artificial Sequence
  PDI-S-protein+H3 Minn DNA
atggcgaaaaacgttgcgattttcggcttattgttttctcttcttgtgttggttccttctcagatcttcgcggtgaatcttacgacgcgaacacagttaccacccgcatatacaaatagcttcactcggggtgtttattaccccgacaaagtgttcaggtcctccgtgctccactcaacacaggacctctttcttcctttcttttctaacgtgacatggtttcatgccattcatgtatccggcactaacggtactaagaggttcgataatcctgtgctccctttcaatgacggcgtttactttgcaagcacagagaagagtaacatcatccgaggttggatctttggcactaccctcgattcaaagacgcagagcctcctcattgtgaacaatgccactaacgtggtgatcaaagtttgcgagtttcagttctgcaatgaccctttcttgggggtgtactatcataagaacaacaagtcttggatggaatctgaattccgcgtctatagcagcgccaacaactgcacctttgaatacgtgtcccagcccttccttatggacctggagggaaagcagggaaactttaagaatctgagagagttcgtgtttaaaaatatcgacggctattttaagatctattctaagcacacgcctattaatctcgtgcgcgatcttccacaaggcttcagcgccctggaaccactcgtggacctcccaattggtatcaacatcactagatttcagactctgcttgccctccaccgatcctatctgacacccggagactcctctagcggctggactgccggcgctgccgcttattacgttggttatcttcagccacgcacgttcctgctgaagtataacgagaatggtactattaccgatgccgtggattgtgcccttgaccccctgtccgaaactaagtgcacactcaagtcattcactgtggaaaaaggaatctaccagacaagcaattttcgggtccagcctactgagagcattgtgcgctttcctaacatcacaaatctttgccccttcggagaggttttcaatgctacacggtttgcctccgtgtatgcctggaaccgcaagagaatttccaattgcgtggccgattactccgtgctctacaatagtgcaagctttagcacctttaagtgctatggcgtatcccctactaagcttaacgacttgtgtttcacaaacgtgtatgccgactcctttgtgatacggggcgacgaagttagacagatagcaccaggacagacgggaaagatagctgactacaactataagcttcctgatgacttcactggctgcgttatcgcgtggaattctaacaacctggactcaaaagtcggcggcaactataactatctctatcggctgttccgcaagagtaaccttaagccctttgagagagatataagcactgaaatctaccaggctggcagtacgccctgtaatggcgtggaaggctttaattgttattttccactgcaatcctatggttttcagccaaccaatggcgtgggctaccaaccataccgcgtcgtggtgctctcctttgaactgctccacgctcccgcgactgtctgcggccccaagaagtccacgaaccttgtgaagaataagtgcgttaattttaatttcaacggcctcactggaacaggagtgctcactgagagtaacaagaagttcctgccatttcaacaatttggcagagacatagccgatactactgacgccgttagggacccccagaccctcgagattctcgatataacgccctgctccttcggtggagtttccgtgatcacgccaggcaccaataccagtaaccaggtcgccgtgctgtatcaggatgtcaactgtactgaggtgcccgtagccatccatgcggatcagctcacaccaacttggagggtgtacagcaccggctccaatgtattccagactcgggccggatgccttattggcgccgaacacgtgaacaatagttacgaatgcgatattccaattggcgccggaatctgtgctagctaccagactcagacgaactccccaggcagcgccagcagcgttgccagccagtcaatcatcgcttatacaatgtcacttggagccgaaaactccgtggcttactcaaacaacagcatcgccatccccacaaacttcaccatatccgtgacaactgagattctgccagtgtccatgactaagacgtccgtagattgcactatgtacatatgcggcgacagcacagaatgttctaatctgctgctgcaatatggaagcttctgcactcaactgaacagagcgctcacaggcatcgccgtggagcaggataagaatacccaggaggtgttcgcccaagttaagcagatctacaagaccccacccataaaggatttcggtggattcaattttagtcagatactcccagacccatctaagccatccaagaggagctttatcgaggatcttttgtttaacaaagttactctggccgacgccggtttcatcaagcagtacggagattgcctcggcgacatcgctgctcgtgacctcatctgtgcgcaaaagtttaacggtctgacggtgctgcctcccctccttactgatgaaatgatcgcccagtataccagcgcactcctcgctggcaccataacatccggttggacattcggcgctggtgcagcactgcagataccattcgccatgcaaatggcatatcgtttcaacggtatcggtgtcacacagaatgtcctatatgagaaccagaagctgatcgcaaatcagttcaatagtgccatcggaaaaatccaggatagccttagcagcacagcctcagcccttggcaaactccaggatgtcgtgaaccagaatgcccaggctctcaataccctcgtgaagcagctctcatctaatttcggcgcaatttccagtgtcctcaacgacatcctcagccgcctcgacccccccgaggccgaagtgcagattgacagactgattacaggtcgactccagagcctccagacttacgtgactcagcagctgataagagccgccgagataagggccagcgctaacctggctgccacaaagatgtctgagtgcgtgctgggccagtccaagagagtagacttctgtggcaaaggctaccatctgatgagcttcccacaatccgcacctcacggcgtagtgttcctccacgtgacatatgtaccggctcaggagaagaatttcactaccgctcctgctatatgccatgatggaaaggctcacttcccccgggagggggtgttcgtgtccaacggcacccattggtttgtgactcagcggaatttctacgaaccccagatcataaccactgacaacacatttgtgtccggaaattgtgacgtggtcattggaatagtgaacaacactgtttatgatccactgcagccagaacttgacagctttaaggaggagctcgacaagtacttcaagaatcatacgtcaccagatgtggacctcggagatattagcggtatcaatgccagtgttgtcaatattcagaaggaaatagaccgccttaatgaggtcgccaaaaatctgaacgagagcctcatcgatcttcaggagctgggcaaatatgagcagtacatcaagtggccttggtatatttggcttggcttcatcgccggcctgatcgccatagtaatggtcacaattatgctcatgtgggcctgtcagaagggcaacatcagatgcaacatctgcatctaa

SEQ ID NO: 76 - DNA, 3780 bp, Artificial Sequence
  PDI-S-protein+H6 HK DNA
atggcgaaaaacgttgcgattttcggcttattgttttctcttcttgtgttggttccttctcagatcttcgcggtgaatcttacgacgcgaacacagttaccacccgcatatacaaatagcttcactcggggtgtttattaccccgacaaagtgttcaggtcctccgtgctccactcaacacaggacctctttcttcctttcttttctaacgtgacatggtttcatgccattcatgtatccggcactaacggtactaagaggttcgataatcctgtgctccctttcaatgacggcgtttactttgcaagcacagagaagagtaacatcatccgaggttggatctttggcactaccctcgattcaaagacgcagagcctcctcattgtgaacaatgccactaacgtggtgatcaaagtttgcgagtttcagttctgcaatgaccctttcttgggggtgtactatcataagaacaacaagtcttggatggaatctgaattccgcgtctatagcagcgccaacaactgcacctttgaatacgtgtcccagcccttccttatggacctggagggaaagcagggaaactttaagaatctgagagagttcgtgtttaaaaatatcgacggctattttaagatctattctaagcacacgcctattaatctcgtgcgcgatcttccacaaggcttcagcgccctggaaccactcgtggacctcccaattggtatcaacatcactagatttcagactctgcttgccctccaccgatcctatctgacacccggagactcctctagcggctggactgccggcgctgccgcttattacgttggttatcttcagccacgcacgttcctgctgaagtataacgagaatggtactattaccgatgccgtggattgtgcccttgaccccctgtccgaaactaagtgcacactcaagtcattcactgtggaaaaaggaatctaccagacaagcaattttcgggtccagcctactgagagcattgtgcgctttcctaacatcacaaatctttgccccttcggagaggttttcaatgctacacggtttgcctccgtgtatgcctggaaccgcaagagaatttccaattgcgtggccgattactccgtgctctacaatagtgcaagctttagcacctttaagtgctatggcgtatcccctactaagcttaacgacttgtgtttcacaaacgtgtatgccgactcctttgtgatacggggcgacgaagttagacagatagcaccaggacagacgggaaagatagctgactacaactataagcttcctgatgacttcactggctgcgttatcgcgtggaattctaacaacctggactcaaaagtcggcggcaactataactatctctatcggctgttccgcaagagtaaccttaagccctttgagagagatataagcactgaaatctaccaggctggcagtacgccctgtaatggcgtggaaggctttaattgttattttccactgcaatcctatggttttcagccaaccaatggcgtgggctaccaaccataccgcgtcgtggtgctctcctttgaactgctccacgctcccgcgactgtctgcggccccaagaagtccacgaaccttgtgaagaataagtgcgttaattttaatttcaacggcctcactggaacaggagtgctcactgagagtaacaagaagttcctgccatttcaacaatttggcagagacatagccgatactactgacgccgttagggacccccagaccctcgagattctcgatataacgccctgctccttcggtggagtttccgtgatcacgccaggcaccaataccagtaaccaggtcgccgtgctgtatcaggatgtcaactgtactgaggtgcccgtagccatccatgcggatcagctcacaccaacttggagggtgtacagcaccggctccaatgtattccagactcgggccggatgccttattggcgccgaacacgtgaacaatagttacgaatgcgatattccaattggcgccggaatctgtgctagctaccagactcagacgaactccccaggcagcgccagcagcgttgccagccagtcaatcatcgcttatacaatgtcacttggagccgaaaactccgtggcttactcaaacaacagcatcgccatccccacaaacttcaccatatccgtgacaactgagattctgccagtgtccatgactaagacgtccgtagattgcactatgtacatatgcggcgacagcacagaatgttctaatctgctgctgcaatatggaagcttctgcactcaactgaacagagcgctcacaggcatcgccgtggagcaggataagaatacccaggaggtgttcgcccaagttaagcagatctacaagaccccacccataaaggatttcggtggattcaattttagtcagatactcccagacccatctaagccatccaagaggagctttatcgaggatcttttgtttaacaaagttactctggccgacgccggtttcatcaagcagtacggagattgcctcggcgacatcgctgctcgtgacctcatctgtgcgcaaaagtttaacggtctgacggtgctgcctcccctccttactgatgaaatgatcgcccagtataccagcgcactcctcgctggcaccataacatccggttggacattcggcgctggtgcagcactgcagataccattcgccatgcaaatggcatatcgtttcaacggtatcggtgtcacacagaatgtcctatatgagaaccagaagctgatcgcaaatcagttcaatagtgccatcggaaaaatccaggatagccttagcagcacagcctcagcccttggcaaactccaggatgtcgtgaaccagaatgcccaggctctcaataccctcgtgaagcagctctcatctaatttcggcgcaatttccagtgtcctcaacgacatcctcagccgcctcgacccccccgaggccgaagtgcagattgacagactgattacaggtcgactccagagcctccagacttacgtgactcagcagctgataagagccgccgagataagggccagcgctaacctggctgccacaaagatgtctgagtgcgtgctgggccagtccaagagagtagacttctgtggcaaaggctaccatctgatgagcttcccacaatccgcacctcacggcgtagtgttcctccacgtgacatatgtaccggctcaggagaagaatttcactaccgctcctgctatatgccatgatggaaaggctcacttcccccgggagggggtgttcgtgtccaacggcacccattggtttgtgactcagcggaatttctacgaaccccagatcataaccactgacaacacatttgtgtccggaaattgtgacgtggtcattggaatagtgaacaacactgtttatgatccactgcagccagaacttgacagctttaaggaggagctcgacaagtacttcaagaatcatacgtcaccagatgtggacctcggagatattagcggtatcaatgccagtgttgtcaatattcagaaggaaatagaccgccttaatgaggtcgccaaaaatctgaacgagagcctcatcgatcttcaggagctgggcaaatatgagcagtacatcaagtggccttggtatatttggcttggcttcatcgccggcctgatcgccatagtaatggtcacaattatgctcggtctttggatgtgttcaaatggttcaatgcagtgcaggatatgtatataa

SEQ ID NO: 77 - DNA, 3780 bp, Artificial Sequence
  PDI-S-protein+H7 Guangdong DNA
atggcgaaaaacgttgcgattttcggcttattgttttctcttcttgtgttggttccttctcagatcttcgcggtgaatcttacgacgcgaacacagttaccacccgcatatacaaatagcttcactcggggtgtttattaccccgacaaagtgttcaggtcctccgtgctccactcaacacaggacctctttcttcctttcttttctaacgtgacatggtttcatgccattcatgtatccggcactaacggtactaagaggttcgataatcctgtgctccctttcaatgacggcgtttactttgcaagcacagagaagagtaacatcatccgaggttggatctttggcactaccctcgattcaaagacgcagagcctcctcattgtgaacaatgccactaacgtggtgatcaaagtttgcgagtttcagttctgcaatgaccctttcttgggggtgtactatcataagaacaacaagtcttggatggaatctgaattccgcgtctatagcagcgccaacaactgcacctttgaatacgtgtcccagcccttccttatggacctggagggaaagcagggaaactttaagaatctgagagagttcgtgtttaaaaatatcgacggctattttaagatctattctaagcacacgcctattaatctcgtgcgcgatcttccacaaggcttcagcgccctggaaccactcgtggacctcccaattggtatcaacatcactagatttcagactctgcttgccctccaccgatcctatctgacacccggagactcctctagcggctggactgccggcgctgccgcttattacgttggttatcttcagccacgcacgttcctgctgaagtataacgagaatggtactattaccgatgccgtggattgtgcccttgaccccctgtccgaaactaagtgcacactcaagtcattcactgtggaaaaaggaatctaccagacaagcaattttcgggtccagcctactgagagcattgtgcgctttcctaacatcacaaatctttgccccttcggagaggttttcaatgctacacggtttgcctccgtgtatgcctggaaccgcaagagaatttccaattgcgtggccgattactccgtgctctacaatagtgcaagctttagcacctttaagtgctatggcgtatcccctactaagcttaacgacttgtgtttcacaaacgtgtatgccgactcctttgtgatacggggcgacgaagttagacagatagcaccaggacagacgggaaagatagctgactacaactataagcttcctgatgacttcactggctgcgttatcgcgtggaattctaacaacctggactcaaaagtcggcggcaactataactatctctatcggctgttccgcaagagtaaccttaagccctttgagagagatataagcactgaaatctaccaggctggcagtacgccctgtaatggcgtggaaggctttaattgttattttccactgcaatcctatggttttcagccaaccaatggcgtgggctaccaaccataccgcgtcgtggtgctctcctttgaactgctccacgctcccgcgactgtctgcggccccaagaagtccacgaaccttgtgaagaataagtgcgttaattttaatttcaacggcctcactggaacaggagtgctcactgagagtaacaagaagttcctgccatttcaacaatttggcagagacatagccgatactactgacgccgttagggacccccagaccctcgagattctcgatataacgccctgctccttcggtggagtttccgtgatcacgccaggcaccaataccagtaaccaggtcgccgtgctgtatcaggatgtcaactgtactgaggtgcccgtagccatccatgcggatcagctcacaccaacttggagggtgtacagcaccggctccaatgtattccagactcgggccggatgccttattggcgccgaacacgtgaacaatagttacgaatgcgatattccaattggcgccggaatctgtgctagctaccagactcagacgaactccccaggcagcgccagcagcgttgccagccagtcaatcatcgcttatacaatgtcacttggagccgaaaactccgtggcttactcaaacaacagcatcgccatccccacaaacttcaccatatccgtgacaactgagattctgccagtgtccatgactaagacgtccgtagattgcactatgtacatatgcggcgacagcacagaatgttctaatctgctgctgcaatatggaagcttctgcactcaactgaacagagcgctcacaggcatcgccgtggagcaggataagaatacccaggaggtgttcgcccaagttaagcagatctacaagaccccacccataaaggatttcggtggattcaattttagtcagatactcccagacccatctaagccatccaagaggagctttatcgaggatcttttgtttaacaaagttactctggccgacgccggtttcatcaagcagtacggagattgcctcggcgacatcgctgctcgtgacctcatctgtgcgcaaaagtttaacggtctgacggtgctgcctcccctccttactgatgaaatgatcgcccagtataccagcgcactcctcgctggcaccataacatccggttggacattcggcgctggtgcagcactgcagataccattcgccatgcaaatggcatatcgtttcaacggtatcggtgtcacacagaatgtcctatatgagaaccagaagctgatcgcaaatcagttcaatagtgccatcggaaaaatccaggatagccttagcagcacagcctcagcccttggcaaactccaggatgtcgtgaaccagaatgcccaggctctcaataccctcgtgaagcagctctcatctaatttcggcgcaatttccagtgtcctcaacgacatcctcagccgcctcgacccccccgaggccgaagtgcagattgacagactgattacaggtcgactccagagcctccagacttacgtgactcagcagctgataagagccgccgagataagggccagcgctaacctggctgccacaaagatgtctgagtgcgtgctgggccagtccaagagagtagacttctgtggcaaaggctaccatctgatgagcttcccacaatccgcacctcacggcgtagtgttcctccacgtgacatatgtaccggctcaggagaagaatttcactaccgctcctgctatatgccatgatggaaaggctcacttcccccgggagggggtgttcgtgtccaacggcacccattggtttgtgactcagcggaatttctacgaaccccagatcataaccactgacaacacatttgtgtccggaaattgtgacgtggtcattggaatagtgaacaacactgtttatgatccactgcagccagaacttgacagctttaaggaggagctcgacaagtacttcaagaatcatacgtcaccagatgtggacctcggagatattagcggtatcaatgccagtgttgtcaatattcagaaggaaatagaccgccttaatgaggtcgccaaaaatctgaacgagagcctcatcgatcttcaggagctgggcaaatatgagcagtacatcaagtggccttggtatatttggcttggcttcatcgccggcctgatcgccatagtaatggtcacaattatgctcgtcttcatatgtgtgaagaatggaaacatgcggtgcactatttgtatataa

SEQ ID NO: 78 - DNA, 3780 bp, Artificial Sequence
  PDI-S-protein+H9 HK DNA
atggcgaaaaacgttgcgattttcggcttattgttttctcttcttgtgttggttccttctcagatcttcgcggtgaatcttacgacgcgaacacagttaccacccgcatatacaaatagcttcactcggggtgtttattaccccgacaaagtgttcaggtcctccgtgctccactcaacacaggacctctttcttcctttcttttctaacgtgacatggtttcatgccattcatgtatccggcactaacggtactaagaggttcgataatcctgtgctccctttcaatgacggcgtttactttgcaagcacagagaagagtaacatcatccgaggttggatctttggcactaccctcgattcaaagacgcagagcctcctcattgtgaacaatgccactaacgtggtgatcaaagtttgcgagtttcagttctgcaatgaccctttcttgggggtgtactatcataagaacaacaagtcttggatggaatctgaattccgcgtctatagcagcgccaacaactgcacctttgaatacgtgtcccagcccttccttatggacctggagggaaagcagggaaactttaagaatctgagagagttcgtgtttaaaaatatcgacggctattttaagatctattctaagcacacgcctattaatctcgtgcgcgatcttccacaaggcttcagcgccctggaaccactcgtggacctcccaattggtatcaacatcactagatttcagactctgcttgccctccaccgatcctatctgacacccggagactcctctagcggctggactgccggcgctgccgcttattacgttggttatcttcagccacgcacgttcctgctgaagtataacgagaatggtactattaccgatgccgtggattgtgcccttgaccccctgtccgaaactaagtgcacactcaagtcattcactgtggaaaaaggaatctaccagacaagcaattttcgggtccagcctactgagagcattgtgcgctttcctaacatcacaaatctttgccccttcggagaggttttcaatgctacacggtttgcctccgtgtatgcctggaaccgcaagagaatttccaattgcgtggccgattactccgtgctctacaatagtgcaagctttagcacctttaagtgctatggcgtatcccctactaagcttaacgacttgtgtttcacaaacgtgtatgccgactcctttgtgatacggggcgacgaagttagacagatagcaccaggacagacgggaaagatagctgactacaactataagcttcctgatgacttcactggctgcgttatcgcgtggaattctaacaacctggactcaaaagtcggcggcaactataactatctctatcggctgttccgcaagagtaaccttaagccctttgagagagatataagcactgaaatctaccaggctggcagtacgccctgtaatggcgtggaaggctttaattgttattttccactgcaatcctatggttttcagccaaccaatggcgtgggctaccaaccataccgcgtcgtggtgctctcctttgaactgctccacgctcccgcgactgtctgcggccccaagaagtccacgaaccttgtgaagaataagtgcgttaattttaatttcaacggcctcactggaacaggagtgctcactgagagtaacaagaagttcctgccatttcaacaatttggcagagacatagccgatactactgacgccgttagggacccccagaccctcgagattctcgatataacgccctgctccttcggtggagtttccgtgatcacgccaggcaccaataccagtaaccaggtcgccgtgctgtatcaggatgtcaactgtactgaggtgcccgtagccatccatgcggatcagctcacaccaacttggagggtgtacagcaccggctccaatgtattccagactcgggccggatgccttattggcgccgaacacgtgaacaatagttacgaatgcgatattccaattggcgccggaatctgtgctagctaccagactcagacgaactccccaggcagcgccagcagcgttgccagccagtcaatcatcgcttatacaatgtcacttggagccgaaaactccgtggcttactcaaacaacagcatcgccatccccacaaacttcaccatatccgtgacaactgagattctgccagtgtccatgactaagacgtccgtagattgcactatgtacatatgcggcgacagcacagaatgttctaatctgctgctgcaatatggaagcttctgcactcaactgaacagagcgctcacaggcatcgccgtggagcaggataagaatacccaggaggtgttcgcccaagttaagcagatctacaagaccccacccataaaggatttcggtggattcaattttagtcagatactcccagacccatctaagccatccaagaggagctttatcgaggatcttttgtttaacaaagttactctggccgacgccggtttcatcaagcagtacggagattgcctcggcgacatcgctgctcgtgacctcatctgtgcgcaaaagtttaacggtctgacggtgctgcctcccctccttactgatgaaatgatcgcccagtataccagcgcactcctcgctggcaccataacatccggttggacattcggcgctggtgcagcactgcagataccattcgccatgcaaatggcatatcgtttcaacggtatcggtgtcacacagaatgtcctatatgagaaccagaagctgatcgcaaatcagttcaatagtgccatcggaaaaatccaggatagccttagcagcacagcctcagcccttggcaaactccaggatgtcgtgaaccagaatgcccaggctctcaataccctcgtgaagcagctctcatctaatttcggcgcaatttccagtgtcctcaacgacatcctcagccgcctcgacccccccgaggccgaagtgcagattgacagactgattacaggtcgactccagagcctccagacttacgtgactcagcagctgataagagccgccgagataagggccagcgctaacctggctgccacaaagatgtctgagtgcgtgctgggccagtccaagagagtagacttctgtggcaaaggctaccatctgatgagcttcccacaatccgcacctcacggcgtagtgttcctccacgtgacatatgtaccggctcaggagaagaatttcactaccgctcctgctatatgccatgatggaaaggctcacttcccccgggagggggtgttcgtgtccaacggcacccattggtttgtgactcagcggaatttctacgaaccccagatcataaccactgacaacacatttgtgtccggaaattgtgacgtggtcattggaatagtgaacaacactgtttatgatccactgcagccagaacttgacagctttaaggaggagctcgacaagtacttcaagaatcatacgtcaccagatgtggacctcggagatattagcggtatcaatgccagtgttgtcaatattcagaaggaaatagaccgccttaatgaggtcgccaaaaatctgaacgagagcctcatcgatcttcaggagctgggcaaatatgagcagtacatcaagtggccttggtatatttggcttggcttcatcgccggcctgatcgccatagtaatggtcacaattatgctcctgttctgggccatgtccaatggatcttgcagatgcaacatttgtatataa

SEQ ID NO: 79 - DNA, 3780 bp, Artificial Sequence
  PDI-S-protein+ B/ Wash DNA
atggcgaaaaacgttgcgattttcggcttattgttttctcttcttgtgttggttccttctcagatcttcgcggtgaatcttacgacgcgaacacagttaccacccgcatatacaaatagcttcactcggggtgtttattaccccgacaaagtgttcaggtcctccgtgctccactcaacacaggacctctttcttcctttcttttctaacgtgacatggtttcatgccattcatgtatccggcactaacggtactaagaggttcgataatcctgtgctccctttcaatgacggcgtttactttgcaagcacagagaagagtaacatcatccgaggttggatctttggcactaccctcgattcaaagacgcagagcctcctcattgtgaacaatgccactaacgtggtgatcaaagtttgcgagtttcagttctgcaatgaccctttcttgggggtgtactatcataagaacaacaagtcttggatggaatctgaattccgcgtctatagcagcgccaacaactgcacctttgaatacgtgtcccagcccttccttatggacctggagggaaagcagggaaactttaagaatctgagagagttcgtgtttaaaaatatcgacggctattttaagatctattctaagcacacgcctattaatctcgtgcgcgatcttccacaaggcttcagcgccctggaaccactcgtggacctcccaattggtatcaacatcactagatttcagactctgcttgccctccaccgatcctatctgacacccggagactcctctagcggctggactgccggcgctgccgcttattacgttggttatcttcagccacgcacgttcctgctgaagtataacgagaatggtactattaccgatgccgtggattgtgcccttgaccccctgtccgaaactaagtgcacactcaagtcattcactgtggaaaaaggaatctaccagacaagcaattttcgggtccagcctactgagagcattgtgcgctttcctaacatcacaaatctttgccccttcggagaggttttcaatgctacacggtttgcctccgtgtatgcctggaaccgcaagagaatttccaattgcgtggccgattactccgtgctctacaatagtgcaagctttagcacctttaagtgctatggcgtatcccctactaagcttaacgacttgtgtttcacaaacgtgtatgccgactcctttgtgatacggggcgacgaagttagacagatagcaccaggacagacgggaaagatagctgactacaactataagcttcctgatgacttcactggctgcgttatcgcgtggaattctaacaacctggactcaaaagtcggcggcaactataactatctctatcggctgttccgcaagagtaaccttaagccctttgagagagatataagcactgaaatctaccaggctggcagtacgccctgtaatggcgtggaaggctttaattgttattttccactgcaatcctatggttttcagccaaccaatggcgtgggctaccaaccataccgcgtcgtggtgctctcctttgaactgctccacgctcccgcgactgtctgcggccccaagaagtccacgaaccttgtgaagaataagtgcgttaattttaatttcaacggcctcactggaacaggagtgctcactgagagtaacaagaagttcctgccatttcaacaatttggcagagacatagccgatactactgacgccgttagggacccccagaccctcgagattctcgatataacgccctgctccttcggtggagtttccgtgatcacgccaggcaccaataccagtaaccaggtcgccgtgctgtatcaggatgtcaactgtactgaggtgcccgtagccatccatgcggatcagctcacaccaacttggagggtgtacagcaccggctccaatgtattccagactcgggccggatgccttattggcgccgaacacgtgaacaatagttacgaatgcgatattccaattggcgccggaatctgtgctagctaccagactcagacgaactccccaggcagcgccagcagcgttgccagccagtcaatcatcgcttatacaatgtcacttggagccgaaaactccgtggcttactcaaacaacagcatcgccatccccacaaacttcaccatatccgtgacaactgagattctgccagtgtccatgactaagacgtccgtagattgcactatgtacatatgcggcgacagcacagaatgttctaatctgctgctgcaatatggaagcttctgcactcaactgaacagagcgctcacaggcatcgccgtggagcaggataagaatacccaggaggtgttcgcccaagttaagcagatctacaagaccccacccataaaggatttcggtggattcaattttagtcagatactcccagacccatctaagccatccaagaggagctttatcgaggatcttttgtttaacaaagttactctggccgacgccggtttcatcaagcagtacggagattgcctcggcgacatcgctgctcgtgacctcatctgtgcgcaaaagtttaacggtctgacggtgctgcctcccctccttactgatgaaatgatcgcccagtataccagcgcactcctcgctggcaccataacatccggttggacattcggcgctggtgcagcactgcagataccattcgccatgcaaatggcatatcgtttcaacggtatcggtgtcacacagaatgtcctatatgagaaccagaagctgatcgcaaatcagttcaatagtgccatcggaaaaatccaggatagccttagcagcacagcctcagcccttggcaaactccaggatgtcgtgaaccagaatgcccaggctctcaataccctcgtgaagcagctctcatctaatttcggcgcaatttccagtgtcctcaacgacatcctcagccgcctcgacccccccgaggccgaagtgcagattgacagactgattacaggtcgactccagagcctccagacttacgtgactcagcagctgataagagccgccgagataagggccagcgctaacctggctgccacaaagatgtctgagtgcgtgctgggccagtccaagagagtagacttctgtggcaaaggctaccatctgatgagcttcccacaatccgcacctcacggcgtagtgttcctccacgtgacatatgtaccggctcaggagaagaatttcactaccgctcctgctatatgccatgatggaaaggctcacttcccccgggagggggtgttcgtgtccaacggcacccattggtttgtgactcagcggaatttctacgaaccccagatcataaccactgacaacacatttgtgtccggaaattgtgacgtggtcattggaatagtgaacaacactgtttatgatccactgcagccagaacttgacagctttaaggaggagctcgacaagtacttcaagaatcatacgtcaccagatgtggacctcggagatattagcggtatcaatgccagtgttgtcaatattcagaaggaaatagaccgccttaatgaggtcgccaaaaatctgaacgagagcctcatcgatcttcaggagctgggcaaatatgagcagtacatcaagtggccttggtatatttggcttggcttcatcgccggcctgatcgccatagtaatggtcacaattatgctcgttgtttatatggtctccagagacaatgtttcttgctccatttgtctataa

SEQ ID NO: 80 - DNA, 48 bp, Artificial Sequence
  IF-H1HawaiiCT.r
acgacacgactaaggcctttaaatacatattctacactgtagagaccc

SEQ ID NO: 81 - DNA, 54 bp, Artificial Sequence
  IF-H3MinnesotaCT.r
acgacacgactaaggcctttagatgcagatgttgcatctgatgttgcccttctg

SEQ ID NO: 82 - DNA, 52 bp, Artificial Sequence
  IF-HongKongCT.r
acgacacgactaaggcctttatatacatatcctgcactgcattgaaccattt

SEQ ID NO: 83 - DNA, 49 bp, Artificial Sequence
  IF-GuangdongCT.r
acgacacgactaaggcctttatatacaaatagtgcaccgcatgtttcca

SEQ ID NO: 84 - DNA, 50 bp, Artificial Sequence
  IF-H9HKCT.r
acgacacgactaaggcctttatatacaaatgttgcatctgcaagatccat

SEQ ID NO: 85 - DNA, 50 bp, Artificial Sequence
  IF-BWashCT.r
acgacacgactaaggcctttatagacaaatggagcaagaaacattgtctc

SEQ ID NO: 86 - DNA, 50 bp, Artificial Sequence
  IF(nbHEL40)-PDI.c
ccaaaacacattgagcaaaatggcgaaaaacgttgcgattttcggcttat

SEQ ID NO: 87 - DNA, 50 bp, Artificial Sequence
  IF(AvB+wtCT).r
acgacacgactaaggcctttaggtataatggagtttcacccccttcagaa

SEQ ID NO: 88 - DNA, 3801 bp, Artificial Sequence
  PDI-SARS-COV-1 wtTMCT-DNA
atggcgaaaaacgttgcgattttcggcttattgttttctcttcttgtgttggttccttctcagatcttcgcgtccgatctggatcggtgcactacatttgacgatgtgcaggcacctaattatactcagcacacctcttccatgcggggcgtgtactaccccgacgagatttttagaagtgacacactgtacctgacccaagacctttttctcccattttatagcaatgtcacgggattccacactatcaatcacacattcggaaaccctgttatcccctttaaagacggtatctactttgctgctactgagaaatcgaatgttgttcgcggttgggtgttcggctcaaccatgaacaacaagagtcagtcagtaataattataaacaactcaaccaatgtcgtcatcagggcttgcaacttcgagctctgcgataaccccttctttgcggtgtccaaaccgatgggcactcagacccataccatgatttttgacaatgcctttaattgtactttcgaatacatcagcgatgccttctcgctggatgtgtccgagaagagcggtaacttcaagcatttgcgggagttcgttttcaaaaacaaagacgggtttttgtatgtctacaaaggctatcagcccattgatgtggtcagggatctgcccagtggtttcaacacactgaagcccatcttcaagttgccactcggcatcaacatcactaatttccgcgccatcctaactgctttttcgccagcgcaggatatttgggggacatccgccgcagcttacttcgtgggatatctgaagcccaccacttttatgctaaagtacgacgagaatggcaccatcaccgatgccgtggactgctcacagaatcctctcgcagagctcaagtgttcagtgaagtcatttgagatcgacaaagggatctaccaaacatctaactttcgcgtcgtgccttccggtgacgtagtccgtttcccaaatatcactaacttgtgcccttttggtgaagtattcaacgcaaccaaattccccagtgtgtatgcgtgggagcgcaaaaagatcagtaactgtgtggctgactatagtgttctgtacaatagcaccttcttcagcaccttcaagtgttatggagtgagcgctacaaaactgaacgatctttgtttctcaaacgtgtacgccgattcatttgtcgttaaaggtgacgatgtgaggcagatcgctccaggccagacaggtgtgattgctgactataattacaaactgccagacgacttcatggggtgcgtgctagcttggaatacaagaaacattgacgccacctccacgggaaattacaattacaagtatcgttaccttcgccatggaaagttgagacccttcgagcgtgatataagtaacgtgccctttagtccagatggaaaaccctgcacaccccctgctctcaattgctattggcctctcaatgactacggcttttacacaactactggcatcggataccagccttaccgggtcgtggtgctcagttttgagttgcttaacgcacccgccaccgtgtgtggtcctaaactttctactgacctgattaaaaaccaatgcgtcaacttcaattttaacgggctgaccggcaccggtgtcctgacccctagctctaagagattccagccttttcagcagttcgggagggatgtgagcgactttaccgactctgtcagggatccaaagaccagcgagatactggatatctcgccctgcagtttcggtggcgtgtccgttattacacctggcaccaacgcctcctcagaggtggcggtgctctatcaagatgtcaactgcactgatgtgtcaactgccatccatgccgatcagctgacccccgcctggcgcatctacagtaccgggaacaacgtttttcagacccaggccggctgtctaatcggcgcagagcacgttgacacatcctacgaatgtgacatacctatcggggcaggcatttgcgctagctaccataccgtgtcactgttggcttccacgtcacaaaagtcaatcgttgcctacacgatgagtctgggggctgactcatctatcgcctacagcaacaataccattgcaattcccacaaacttcagtatctccatcacaacagaggtgatgcccgtttctatggctaaaacatcagtcgattgcaatatgtatatatgcggcgatagtactgagtgcgccaatctcttgttacagtacggctccttttgtacccagctgaaccgagcactgtctggaatcgccgcagaacaggatcgcaatacccgggaagtcttcgcccaggtgaagcagatgtacaaaacgcccactctcaagtatttcggcggattcaacttttctcagattttgcctgacccgctcaagccaacaaaacgatcttttatcgaagaccttctgtttaacaaggtcacactggcggatgctgggttcatgaaacagtacggtgaatgcctgggggacatcaatgccagagatctgatctgcgcccagaaattcaatggcttaacagtcctcccacctctcttgaccgacgatatgatcgctgcgtacaccgctgctctggtatcgggcaccgcgactgctggctggacctttggtgccggagccgcactccagatcccattcgccatgcagatggcctaccgcttcaacggaatcggggtcacccagaacgtgctgtatgagaaccagaaacagatcgccaatcagttcaataaggcaattagtcagattcaggagagtcttaccactaccagcaccgccctgggcaagctgcaagatgttgtgaaccagaatgcgcaggcattaaacactctggttaaacagctgagctcaaattttggtgcaatctcttcagttctgaacgatatcctgagtcggctggatccgccagaggctgaagtgcaaattgatcgtttgatcaccgggaggctacaatctctgcagacgtacgtgacccagcagctcatccgggcagccgaaattcgcgcatcagccaacctcgctgcaactaagatgtctgagtgcgtgctgggccagagtaagagggtggacttttgtggtaagggataccacctcatgtcctttccgcaagcggctccccacggcgtggttttcttacacgttacctatgtgccatcccaagaacgcaatttcaccaccgctccagctatctgtcatgagggcaaagcatatttccccagggaaggagtatttgtgtttaatggcacgtcctggtttataacccaacgtaactttttctccccacagattatcacaaccgacaacacattcgtgtctgggaattgtgacgtcgtgatcgggatcattaacaataccgtttacgatcccttgcagcccgagcttgactcctttaaagaggaactagacaaatactttaagaatcacacctcaccggacgtagatttgggagacatctctggaattaatgcctctgtggtgaatatccagaaggagatcgaccgcctgaatgaagtcgccaagaacctcaacgagtccctgatagatctgcaagaactgggcaaatatgaacagtacatcaaatggccgtggtacgtgtggttgggctttatcgctggacttattgcaatcgtgatggtgacgattctgctctgctgtatgacttcctgctgctcttgtctgaagggcgcctgtagctgtggttcctgctgcaagttcgacgaagacgactccgaaccagttctgaagggggtgaaactccattatacctaa

SEQ ID NO: 89 - DNA, 3741 bp, Artificial Sequence
  PDI-SARS-COV-1 H5iTMCT-DNA
atggcgaaaaacgttgcgattttcggcttattgttttctcttcttgtgttggttccttctcagatcttcgcgtccgatctggatcggtgcactacatttgacgatgtgcaggcacctaattatactcagcacacctcttccatgcggggcgtgtactaccccgacgagatttttagaagtgacacactgtacctgacccaagacctttttctcccattttatagcaatgtcacgggattccacactatcaatcacacattcggaaaccctgttatcccctttaaagacggtatctactttgctgctactgagaaatcgaatgttgttcgcggttgggtgttcggctcaaccatgaacaacaagagtcagtcagtaataattataaacaactcaaccaatgtcgtcatcagggcttgcaacttcgagctctgcgataaccccttctttgcggtgtccaaaccgatgggcactcagacccataccatgatttttgacaatgcctttaattgtactttcgaatacatcagcgatgccttctcgctggatgtgtccgagaagagcggtaacttcaagcatttgcgggagttcgttttcaaaaacaaagacgggtttttgtatgtctacaaaggctatcagcccattgatgtggtcagggatctgcccagtggtttcaacacactgaagcccatcttcaagttgccactcggcatcaacatcactaatttccgcgccatcctaactgctttttcgccagcgcaggatatttgggggacatccgccgcagcttacttcgtgggatatctgaagcccaccacttttatgctaaagtacgacgagaatggcaccatcaccgatgccgtggactgctcacagaatcctctcgcagagctcaagtgttcagtgaagtcatttgagatcgacaaagggatctaccaaacatctaactttcgcgtcgtgccttccggtgacgtagtccgtttcccaaatatcactaacttgtgcccttttggtgaagtattcaacgcaaccaaattccccagtgtgtatgcgtgggagcgcaaaaagatcagtaactgtgtggctgactatagtgttctgtacaatagcaccttcttcagcaccttcaagtgttatggagtgagcgctacaaaactgaacgatctttgtttctcaaacgtgtacgccgattcatttgtcgttaaaggtgacgatgtgaggcagatcgctccaggccagacaggtgtgattgctgactataattacaaactgccagacgacttcatggggtgcgtgctagcttggaatacaagaaacattgacgccacctccacgggaaattacaattacaagtatcgttaccttcgccatggaaagttgagacccttcgagcgtgatataagtaacgtgccctttagtccagatggaaaaccctgcacaccccctgctctcaattgctattggcctctcaatgactacggcttttacacaactactggcatcggataccagccttaccgggtcgtggtgctcagttttgagttgcttaacgcacccgccaccgtgtgtggtcctaaactttctactgacctgattaaaaaccaatgcgtcaacttcaattttaacgggctgaccggcaccggtgtcctgacccctagctctaagagattccagccttttcagcagttcgggagggatgtgagcgactttaccgactctgtcagggatccaaagaccagcgagatactggatatctcgccctgcagtttcggtggcgtgtccgttattacacctggcaccaacgcctcctcagaggtggcggtgctctatcaagatgtcaactgcactgatgtgtcaactgccatccatgccgatcagctgacccccgcctggcgcatctacagtaccgggaacaacgtttttcagacccaggccggctgtctaatcggcgcagagcacgttgacacatcctacgaatgtgacatacctatcggggcaggcatttgcgctagctaccataccgtgtcactgttggcttccacgtcacaaaagtcaatcgttgcctacacgatgagtctgggggctgactcatctatcgcctacagcaacaataccattgcaattcccacaaacttcagtatctccatcacaacagaggtgatgcccgtttctatggctaaaacatcagtcgattgcaatatgtatatatgcggcgatagtactgagtgcgccaatctcttgttacagtacggctccttttgtacccagctgaaccgagcactgtctggaatcgccgcagaacaggatcgcaatacccgggaagtcttcgcccaggtgaagcagatgtacaaaacgcccactctcaagtatttcggcggattcaacttttctcagattttgcctgacccgctcaagccaacaaaacgatcttttatcgaagaccttctgtttaacaaggtcacactggcggatgctgggttcatgaaacagtacggtgaatgcctgggggacatcaatgccagagatctgatctgcgcccagaaattcaatggcttaacagtcctcccacctctcttgaccgacgatatgatcgctgcgtacaccgctgctctggtatcgggcaccgcgactgctggctggacctttggtgccggagccgcactccagatcccattcgccatgcagatggcctaccgcttcaacggaatcggggtcacccagaacgtgctgtatgagaaccagaaacagatcgccaatcagttcaataaggcaattagtcagattcaggagagtcttaccactaccagcaccgccctgggcaagctgcaagatgttgtgaaccagaatgcgcaggcattaaacactctggttaaacagctgagctcaaattttggtgcaatctcttcagttctgaacgatatcctgagtcggctggatccgccagaggctgaagtgcaaattgatcgtttgatcaccgggaggctacaatctctgcagacgtacgtgacccagcagctcatccgggcagccgaaattcgcgcatcagccaacctcgctgcaactaagatgtctgagtgcgtgctgggccagagtaagagggtggacttttgtggtaagggataccacctcatgtcctttccgcaagcggctccccacggcgtggttttcttacacgttacctatgtgccatcccaagaacgcaatttcaccaccgctccagctatctgtcatgagggcaaagcatatttccccagggaaggagtatttgtgtttaatggcacgtcctggtttataacccaacgtaactttttctccccacagattatcacaaccgacaacacattcgtgtctgggaattgtgacgtcgtgatcgggatcattaacaataccgtttacgatcccttgcagcccgagcttgactcctttaaagaggaactagacaaatactttaagaatcacacctcaccggacgtagatttgggagacatctctggaattaatgcctctgtggtgaatatccagaaggagatcgaccgcctgaatgaagtcgccaagaacctcaacgagtccctgatagatctgcaagaactgggcaaatatgaacagtacatcaaatggccgtggtaccaaatactgtcaatttattcaacagtggcgagttccctagcactggcaatcatgatggctggtctatctttatggatgtgctccaatggatcgttacaatgcagaatttgcatttaa

SEQ ID NO: 90 - DNA, 3732 bp, Artificial Sequence
  PDI-SARS-COV-1 H5iCT-DNA
atggcgaaaaacgttgcgattttcggcttattgttttctcttcttgtgttggttccttctcagatcttcgcgtccgatctggatcggtgcactacatttgacgatgtgcaggcacctaattatactcagcacacctcttccatgcggggcgtgtactaccccgacgagatttttagaagtgacacactgtacctgacccaagacctttttctcccattttatagcaatgtcacgggattccacactatcaatcacacattcggaaaccctgttatcccctttaaagacggtatctactttgctgctactgagaaatcgaatgttgttcgcggttgggtgttcggctcaaccatgaacaacaagagtcagtcagtaataattataaacaactcaaccaatgtcgtcatcagggcttgcaacttcgagctctgcgataaccccttctttgcggtgtccaaaccgatgggcactcagacccataccatgatttttgacaatgcctttaattgtactttcgaatacatcagcgatgccttctcgctggatgtgtccgagaagagcggtaacttcaagcatttgcgggagttcgttttcaaaaacaaagacgggtttttgtatgtctacaaaggctatcagcccattgatgtggtcagggatctgcccagtggtttcaacacactgaagcccatcttcaagttgccactcggcatcaacatcactaatttccgcgccatcctaactgctttttcgccagcgcaggatatttgggggacatccgccgcagcttacttcgtgggatatctgaagcccaccacttttatgctaaagtacgacgagaatggcaccatcaccgatgccgtggactgctcacagaatcctctcgcagagctcaagtgttcagtgaagtcatttgagatcgacaaagggatctaccaaacatctaactttcgcgtcgtgccttccggtgacgtagtccgtttcccaaatatcactaacttgtgcccttttggtgaagtattcaacgcaaccaaattccccagtgtgtatgcgtgggagcgcaaaaagatcagtaactgtgtggctgactatagtgttctgtacaatagcaccttcttcagcaccttcaagtgttatggagtgagcgctacaaaactgaacgatctttgtttctcaaacgtgtacgccgattcatttgtcgttaaaggtgacgatgtgaggcagatcgctccaggccagacaggtgtgattgctgactataattacaaactgccagacgacttcatggggtgcgtgctagcttggaatacaagaaacattgacgccacctccacgggaaattacaattacaagtatcgttaccttcgccatggaaagttgagacccttcgagcgtgatataagtaacgtgccctttagtccagatggaaaaccctgcacaccccctgctctcaattgctattggcctctcaatgactacggcttttacacaactactggcatcggataccagccttaccgggtcgtggtgctcagttttgagttgcttaacgcacccgccaccgtgtgtggtcctaaactttctactgacctgattaaaaaccaatgcgtcaacttcaattttaacgggctgaccggcaccggtgtcctgacccctagctctaagagattccagccttttcagcagttcgggagggatgtgagcgactttaccgactctgtcagggatccaaagaccagcgagatactggatatctcgccctgcagtttcggtggcgtgtccgttattacacctggcaccaacgcctcctcagaggtggcggtgctctatcaagatgtcaactgcactgatgtgtcaactgccatccatgccgatcagctgacccccgcctggcgcatctacagtaccgggaacaacgtttttcagacccaggccggctgtctaatcggcgcagagcacgttgacacatcctacgaatgtgacatacctatcggggcaggcatttgcgctagctaccataccgtgtcactgttggcttccacgtcacaaaagtcaatcgttgcctacacgatgagtctgggggctgactcatctatcgcctacagcaacaataccattgcaattcccacaaacttcagtatctccatcacaacagaggtgatgcccgtttctatggctaaaacatcagtcgattgcaatatgtatatatgcggcgatagtactgagtgcgccaatctcttgttacagtacggctccttttgtacccagctgaaccgagcactgtctggaatcgccgcagaacaggatcgcaatacccgggaagtcttcgcccaggtgaagcagatgtacaaaacgcccactctcaagtatttcggcggattcaacttttctcagattttgcctgacccgctcaagccaacaaaacgatcttttatcgaagaccttctgtttaacaaggtcacactggcggatgctgggttcatgaaacagtacggtgaatgcctgggggacatcaatgccagagatctgatctgcgcccagaaattcaatggcttaacagtcctcccacctctcttgaccgacgatatgatcgctgcgtacaccgctgctctggtatcgggcaccgcgactgctggctggacctttggtgccggagccgcactccagatcccattcgccatgcagatggcctaccgcttcaacggaatcggggtcacccagaacgtgctgtatgagaaccagaaacagatcgccaatcagttcaataaggcaattagtcagattcaggagagtcttaccactaccagcaccgccctgggcaagctgcaagatgttgtgaaccagaatgcgcaggcattaaacactctggttaaacagctgagctcaaattttggtgcaatctcttcagttctgaacgatatcctgagtcggctggatccgccagaggctgaagtgcaaattgatcgtttgatcaccgggaggctacaatctctgcagacgtacgtgacccagcagctcatccgggcagccgaaattcgcgcatcagccaacctcgctgcaactaagatgtctgagtgcgtgctgggccagagtaagagggtggacttttgtggtaagggataccacctcatgtcctttccgcaagcggctccccacggcgtggttttcttacacgttacctatgtgccatcccaagaacgcaatttcaccaccgctccagctatctgtcatgagggcaaagcatatttccccagggaaggagtatttgtgtttaatggcacgtcctggtttataacccaacgtaactttttctccccacagattatcacaaccgacaacacattcgtgtctgggaattgtgacgtcgtgatcgggatcattaacaataccgtttacgatcccttgcagcccgagcttgactcctttaaagaggaactagacaaatactttaagaatcacacctcaccggacgtagatttgggagacatctctggaattaatgcctctgtggtgaatatccagaaggagatcgaccgcctgaatgaagtcgccaagaacctcaacgagtccctgatagatctgcaagaactgggcaaatatgaacagtacatcaaatggccgtggtacgtgtggttgggctttatcgctggacttattgcaatcgtgatggtgacgattctgctctctttatggatgtgctccaatggatcgttacaatgcagaatttgcatttaa

SEQ ID NO: 91 - DNA, 3723 bp, Artificial Sequence
  PDI-SARS-COV-1 H5iCT(V4)-DNA
atggcgaaaaacgttgcgattttcggcttattgttttctcttcttgtgttggttccttctcagatcttcgcgtccgatctggatcggtgcactacatttgacgatgtgcaggcacctaattatactcagcacacctcttccatgcggggcgtgtactaccccgacgagatttttagaagtgacacactgtacctgacccaagacctttttctcccattttatagcaatgtcacgggattccacactatcaatcacacattcggaaaccctgttatcccctttaaagacggtatctactttgctgctactgagaaatcgaatgttgttcgcggttgggtgttcggctcaaccatgaacaacaagagtcagtcagtaataattataaacaactcaaccaatgtcgtcatcagggcttgcaacttcgagctctgcgataaccccttctttgcggtgtccaaaccgatgggcactcagacccataccatgatttttgacaatgcctttaattgtactttcgaatacatcagcgatgccttctcgctggatgtgtccgagaagagcggtaacttcaagcatttgcgggagttcgttttcaaaaacaaagacgggtttttgtatgtctacaaaggctatcagcccattgatgtggtcagggatctgcccagtggtttcaacacactgaagcccatcttcaagttgccactcggcatcaacatcactaatttccgcgccatcctaactgctttttcgccagcgcaggatatttgggggacatccgccgcagcttacttcgtgggatatctgaagcccaccacttttatgctaaagtacgacgagaatggcaccatcaccgatgccgtggactgctcacagaatcctctcgcagagctcaagtgttcagtgaagtcatttgagatcgacaaagggatctaccaaacatctaactttcgcgtcgtgccttccggtgacgtagtccgtttcccaaatatcactaacttgtgcccttttggtgaagtattcaacgcaaccaaattccccagtgtgtatgcgtgggagcgcaaaaagatcagtaactgtgtggctgactatagtgttctgtacaatagcaccttcttcagcaccttcaagtgttatggagtgagcgctacaaaactgaacgatctttgtttctcaaacgtgtacgccgattcatttgtcgttaaaggtgacgatgtgaggcagatcgctccaggccagacaggtgtgattgctgactataattacaaactgccagacgacttcatggggtgcgtgctagcttggaatacaagaaacattgacgccacctccacgggaaattacaattacaagtatcgttaccttcgccatggaaagttgagacccttcgagcgtgatataagtaacgtgccctttagtccagatggaaaaccctgcacaccccctgctctcaattgctattggcctctcaatgactacggcttttacacaactactggcatcggataccagccttaccgggtcgtggtgctcagttttgagttgcttaacgcacccgccaccgtgtgtggtcctaaactttctactgacctgattaaaaaccaatgcgtcaacttcaattttaacgggctgaccggcaccggtgtcctgacccctagctctaagagattccagccttttcagcagttcgggagggatgtgagcgactttaccgactctgtcagggatccaaagaccagcgagatactggatatctcgccctgcagtttcggtggcgtgtccgttattacacctggcaccaacgcctcctcagaggtggcggtgctctatcaagatgtcaactgcactgatgtgtcaactgccatccatgccgatcagctgacccccgcctggcgcatctacagtaccgggaacaacgtttttcagacccaggccggctgtctaatcggcgcagagcacgttgacacatcctacgaatgtgacatacctatcggggcaggcatttgcgctagctaccataccgtgtcactgttggcttccacgtcacaaaagtcaatcgttgcctacacgatgagtctgggggctgactcatctatcgcctacagcaacaataccattgcaattcccacaaacttcagtatctccatcacaacagaggtgatgcccgtttctatggctaaaacatcagtcgattgcaatatgtatatatgcggcgatagtactgagtgcgccaatctcttgttacagtacggctccttttgtacccagctgaaccgagcactgtctggaatcgccgcagaacaggatcgcaatacccgggaagtcttcgcccaggtgaagcagatgtacaaaacgcccactctcaagtatttcggcggattcaacttttctcagattttgcctgacccgctcaagccaacaaaacgatcttttatcgaagaccttctgtttaacaaggtcacactggcggatgctgggttcatgaaacagtacggtgaatgcctgggggacatcaatgccagagatctgatctgcgcccagaaattcaatggcttaacagtcctcccacctctcttgaccgacgatatgatcgctgcgtacaccgctgctctggtatcgggcaccgcgactgctggctggacctttggtgccggagccgcactccagatcccattcgccatgcagatggcctaccgcttcaacggaatcggggtcacccagaacgtgctgtatgagaaccagaaacagatcgccaatcagttcaataaggcaattagtcagattcaggagagtcttaccactaccagcaccgccctgggcaagctgcaagatgttgtgaaccagaatgcgcaggcattaaacactctggttaaacagctgagctcaaattttggtgcaatctcttcagttctgaacgatatcctgagtcggctggatccgccagaggctgaagtgcaaattgatcgtttgatcaccgggaggctacaatctctgcagacgtacgtgacccagcagctcatccgggcagccgaaattcgcgcatcagccaacctcgctgcaactaagatgtctgagtgcgtgctgggccagagtaagagggtggacttttgtggtaagggataccacctcatgtcctttccgcaagcggctccccacggcgtggttttcttacacgttacctatgtgccatcccaagaacgcaatttcaccaccgctccagctatctgtcatgagggcaaagcatatttccccagggaaggagtatttgtgtttaatggcacgtcctggtttataacccaacgtaactttttctccccacagattatcacaaccgacaacacattcgtgtctgggaattgtgacgtcgtgatcgggatcattaacaataccgtttacgatcccttgcagcccgagcttgactcctttaaagaggaactagacaaatactttaagaatcacacctcaccggacgtagatttgggagacatctctggaattaatgcctctgtggtgaatatccagaaggagatcgaccgcctgaatgaagtcgccaagaacctcaacgagtccctgatagatctgcaagaactgggcaaatatgaacagtacatcaaatggccgtggtacgtgtggttgggctttatcgctggacttattgcaatcgtgatggtgacgattctgctctgctgctccaatggatcgttacaatgcagaatttgcatttaa

SEQ ID NO: 92 - DNA, 3732 bp, Artificial Sequence
  PDI-SARS-COV-1 H1cCT-DNA
atggcgaaaaacgttgcgattttcggcttattgttttctcttcttgtgttggttccttctcagatcttcgcgtccgatctggatcggtgcactacatttgacgatgtgcaggcacctaattatactcagcacacctcttccatgcggggcgtgtactaccccgacgagatttttagaagtgacacactgtacctgacccaagacctttttctcccattttatagcaatgtcacgggattccacactatcaatcacacattcggaaaccctgttatcccctttaaagacggtatctactttgctgctactgagaaatcgaatgttgttcgcggttgggtgttcggctcaaccatgaacaacaagagtcagtcagtaataattataaacaactcaaccaatgtcgtcatcagggcttgcaacttcgagctctgcgataaccccttctttgcggtgtccaaaccgatgggcactcagacccataccatgatttttgacaatgcctttaattgtactttcgaatacatcagcgatgccttctcgctggatgtgtccgagaagagcggtaacttcaagcatttgcgggagttcgttttcaaaaacaaagacgggtttttgtatgtctacaaaggctatcagcccattgatgtggtcagggatctgcccagtggtttcaacacactgaagcccatcttcaagttgccactcggcatcaacatcactaatttccgcgccatcctaactgctttttcgccagcgcaggatatttgggggacatccgccgcagcttacttcgtgggatatctgaagcccaccacttttatgctaaagtacgacgagaatggcaccatcaccgatgccgtggactgctcacagaatcctctcgcagagctcaagtgttcagtgaagtcatttgagatcgacaaagggatctaccaaacatctaactttcgcgtcgtgccttccggtgacgtagtccgtttcccaaatatcactaacttgtgcccttttggtgaagtattcaacgcaaccaaattccccagtgtgtatgcgtgggagcgcaaaaagatcagtaactgtgtggctgactatagtgttctgtacaatagcaccttcttcagcaccttcaagtgttatggagtgagcgctacaaaactgaacgatctttgtttctcaaacgtgtacgccgattcatttgtcgttaaaggtgacgatgtgaggcagatcgctccaggccagacaggtgtgattgctgactataattacaaactgccagacgacttcatggggtgcgtgctagcttggaatacaagaaacattgacgccacctccacgggaaattacaattacaagtatcgttaccttcgccatggaaagttgagacccttcgagcgtgatataagtaacgtgccctttagtccagatggaaaaccctgcacaccccctgctctcaattgctattggcctctcaatgactacggcttttacacaactactggcatcggataccagccttaccgggtcgtggtgctcagttttgagttgcttaacgcacccgccaccgtgtgtggtcctaaactttctactgacctgattaaaaaccaatgcgtcaacttcaattttaacgggctgaccggcaccggtgtcctgacccctagctctaagagattccagccttttcagcagttcgggagggatgtgagcgactttaccgactctgtcagggatccaaagaccagcgagatactggatatctcgccctgcagtttcggtggcgtgtccgttattacacctggcaccaacgcctcctcagaggtggcggtgctctatcaagatgtcaactgcactgatgtgtcaactgccatccatgccgatcagctgacccccgcctggcgcatctacagtaccgggaacaacgtttttcagacccaggccggctgtctaatcggcgcagagcacgttgacacatcctacgaatgtgacatacctatcggggcaggcatttgcgctagctaccataccgtgtcactgttggcttccacgtcacaaaagtcaatcgttgcctacacgatgagtctgggggctgactcatctatcgcctacagcaacaataccattgcaattcccacaaacttcagtatctccatcacaacagaggtgatgcccgtttctatggctaaaacatcagtcgattgcaatatgtatatatgcggcgatagtactgagtgcgccaatctcttgttacagtacggctccttttgtacccagctgaaccgagcactgtctggaatcgccgcagaacaggatcgcaatacccgggaagtcttcgcccaggtgaagcagatgtacaaaacgcccactctcaagtatttcggcggattcaacttttctcagattttgcctgacccgctcaagccaacaaaacgatcttttatcgaagaccttctgtttaacaaggtcacactggcggatgctgggttcatgaaacagtacggtgaatgcctgggggacatcaatgccagagatctgatctgcgcccagaaattcaatggcttaacagtcctcccacctctcttgaccgacgatatgatcgctgcgtacaccgctgctctggtatcgggcaccgcgactgctggctggacctttggtgccggagccgcactccagatcccattcgccatgcagatggcctaccgcttcaacggaatcggggtcacccagaacgtgctgtatgagaaccagaaacagatcgccaatcagttcaataaggcaattagtcagattcaggagagtcttaccactaccagcaccgccctgggcaagctgcaagatgttgtgaaccagaatgcgcaggcattaaacactctggttaaacagctgagctcaaattttggtgcaatctcttcagttctgaacgatatcctgagtcggctggatccgccagaggctgaagtgcaaattgatcgtttgatcaccgggaggctacaatctctgcagacgtacgtgacccagcagctcatccgggcagccgaaattcgcgcatcagccaacctcgctgcaactaagatgtctgagtgcgtgctgggccagagtaagagggtggacttttgtggtaagggataccacctcatgtcctttccgcaagcggctccccacggcgtggttttcttacacgttacctatgtgccatcccaagaacgcaatttcaccaccgctccagctatctgtcatgagggcaaagcatatttccccagggaaggagtatttgtgtttaatggcacgtcctggtttataacccaacgtaactttttctccccacagattatcacaaccgacaacacattcgtgtctgggaattgtgacgtcgtgatcgggatcattaacaataccgtttacgatcccttgcagcccgagcttgactcctttaaagaggaactagacaaatactttaagaatcacacctcaccggacgtagatttgggagacatctctggaattaatgcctctgtggtgaatatccagaaggagatcgaccgcctgaatgaagtcgccaagaacctcaacgagtccctgatagatctgcaagaactgggcaaatatgaacagtacatcaaatggccgtggtacgtgtggttgggctttatcgctggacttattgcaatcgtgatggtgacgattctgctcagcttctggatgtgctctaatgggtctctacagtgtagaatatgtatttaa

SEQ ID NO: 93 - protein, 1266 aa, Artificial Sequence
  PDI-SARS-COV-1 wtTMCT-AA
MAKNVAIFGLLFSLLVLVPSQIFASDLDRCTTFDDVQAPNYTQHTSSMRGVYYPDEIFRSDTLYLTQDLFLPFYSNVTGFHTINHTFGNPVIPFKDGIYFAATEKSNVVRGWVFGSTMNNKSQSVIIINNSTNVVIRACNFELCDNPFFAVSKPMGTQTHTMIFDNAFNCTFEYISDAFSLDVSEKSGNFKHLREFVFKNKDGFLYVYKGYQPIDVVRDLPSGFNTLKPIFKLPLGINITNFRAILTAFSPAQDIWGTSAAAYFVGYLKPTTFMLKYDENGTITDAVDCSQNPLAELKCSVKSFEIDKGIYQTSNFRVVPSGDVVRFPNITNLCPFGEVFNATKFPSVYAWERKKISNCVADYSVLYNSTFFSTFKCYGVSATKLNDLCFSNVYADSFVVKGDDVRQIAPGQTGVIADYNYKLPDDFMGCVLAWNTRNIDATSTGNYNYKYRYLRHGKLRPFERDISNVPFSPDGKPCTPPALNCYWPLNDYGFYTTTGIGYQPYRVVVLSFELLNAPATVCGPKLSTDLIKNQCVNFNFNGLTGTGVLTPSSKRFQPFQQFGRDVSDFTDSVRDPKTSEILDISPCSFGGVSVITPGTNASSEVAVLYQDVNCTDVSTAIHADQLTPAWRIYSTGNNVFQTQAGCLIGAEHVDTSYECDIPIGAGICASYHTVSLLASTSQKSIVAYTMSLGADSSIAYSNNTIAIPTNFSISITTEVMPVSMAKTSVDCNMYICGDSTECANLLLQYGSFCTQLNRALSGIAAEQDRNTREVFAQVKQMYKTPTLKYFGGFNFSQILPDPLKPTKRSFIEDLLFNKVTLADAGFMKQYGECLGDINARDLICAQKFNGLTVLPPLLTDDMIAAYTAALVSGTATAGWTFGAGAALQIPFAMQMAYRFNGIGVTQNVLYENQKQIANQFNKAISQIQESLTTTSTALGKLQDVVNQNAQALNTLVKQLSSNFGAISSVLNDILSRLDPPEAEVQIDRLITGRLQSLQTYVTQQLIRAAEIRASANLAATKMSECVLGQSKRVDFCGKGYHLMSFPQAAPHGVVFLHVTYVPSQERNFTTAPAICHEGKAYFPREGVFVFNGTSWFITQRNFFSPQIITTDNTFVSGNCDVVIGIINNTVYDPLQPELDSFKEELDKYFKNHTSPDVDLGDISGINASVVNIQKEIDRLNEVAKNLNESLIDLQELGKYEQYIKWPWYVWLGFIAGLIAIVMVTILLCCMTSCCSCLKGACSCGSCCKFDEDDSEPVLKGVKLHYT

SEQ ID NO: 94 - protein, 1246 aa, Artificial Sequence
  PDI-SARS-COV-1 H5iTMCT-AA
MAKNVAIFGLLFSLLVLVPSQIFASDLDRCTTFDDVQAPNYTQHTSSMRGVYYPDEIFRSDTLYLTQDLFLPFYSNVTGFHTINHTFGNPVIPFKDGIYFAATEKSNVVRGWVFGSTMNNKSQSVIIINNSTNVVIRACNFELCDNPFFAVSKPMGTQTHTMIFDNAFNCTFEYISDAFSLDVSEKSGNFKHLREFVFKNKDGFLYVYKGYQPIDVVRDLPSGFNTLKPIFKLPLGINITNFRAILTAFSPAQDIWGTSAAAYFVGYLKPTTFMLKYDENGTITDAVDCSQNPLAELKCSVKSFEIDKGIYQTSNFRVVPSGDVVRFPNITNLCPFGEVFNATKFPSVYAWERKKISNCVADYSVLYNSTFFSTFKCYGVSATKLNDLCFSNVYADSFVVKGDDVRQIAPGQTGVIADYNYKLPDDFMGCVLAWNTRNIDATSTGNYNYKYRYLRHGKLRPFERDISNVPFSPDGKPCTPPALNCYWPLNDYGFYTTTGIGYQPYRVVVLSFELLNAPATVCGPKLSTDLIKNQCVNFNFNGLTGTGVLTPSSKRFQPFQQFGRDVSDFTDSVRDPKTSEILDISPCSFGGVSVITPGTNASSEVAVLYQDVNCTDVSTAIHADQLTPAWRIYSTGNNVFQTQAGCLIGAEHVDTSYECDIPIGAGICASYHTVSLLASTSQKSIVAYTMSLGADSSIAYSNNTIAIPTNFSISITTEVMPVSMAKTSVDCNMYICGDSTECANLLLQYGSFCTQLNRALSGIAAEQDRNTREVFAQVKQMYKTPTLKYFGGFNFSQILPDPLKPTKRSFIEDLLFNKVTLADAGFMKQYGECLGDINARDLICAQKFNGLTVLPPLLTDDMIAAYTAALVSGTATAGWTFGAGAALQIPFAMQMAYRFNGIGVTQNVLYENQKQIANQFNKAISQIQESLTTTSTALGKLQDVVNQNAQALNTLVKQLSSNFGAISSVLNDILSRLDPPEAEVQIDRLITGRLQSLQTYVTQQLIRAAEIRASANLAATKMSECVLGQSKRVDFCGKGYHLMSFPQAAPHGVVFLHVTYVPSQERNFTTAPAICHEGKAYFPREGVFVFNGTSWFITQRNFFSPQIITTDNTFVSGNCDVVIGIINNTVYDPLQPELDSFKEELDKYFKNHTSPDVDLGDISGINASVVNIQKEIDRLNEVAKNLNESLIDLQELGKYEQYIKWPWYQILSIYSTVASSLALAIMMAGLSLWMCSNGSLQCRICI

SEQ ID NO: 95 - protein, 1243 aa, Artificial Sequence
  PDI-SARS-COV-1 H5iCT-AA
MAKNVAIFGLLFSLLVLVPSQIFASDLDRCTTFDDVQAPNYTQHTSSMRGVYYPDEIFRSDTLYLTQDLFLPFYSNVTGFHTINHTFGNPVIPFKDGIYFAATEKSNVVRGWVFGSTMNNKSQSVIIINNSTNVVIRACNFELCDNPFFAVSKPMGTQTHTMIFDNAFNCTFEYISDAFSLDVSEKSGNFKHLREFVFKNKDGFLYVYKGYQPIDVVRDLPSGFNTLKPIFKLPLGINITNFRAILTAFSPAQDIWGTSAAAYFVGYLKPTTFMLKYDENGTITDAVDCSQNPLAELKCSVKSFEIDKGIYQTSNFRVVPSGDVVRFPNITNLCPFGEVFNATKFPSVYAWERKKISNCVADYSVLYNSTFFSTFKCYGVSATKLNDLCFSNVYADSFVVKGDDVRQIAPGQTGVIADYNYKLPDDFMGCVLAWNTRNIDATSTGNYNYKYRYLRHGKLRPFERDISNVPFSPDGKPCTPPALNCYWPLNDYGFYTTTGIGYQPYRVVVLSFELLNAPATVCGPKLSTDLIKNQCVNFNFNGLTGTGVLTPSSKRFQPFQQFGRDVSDFTDSVRDPKTSEILDISPCSFGGVSVITPGTNASSEVAVLYQDVNCTDVSTAIHADQLTPAWRIYSTGNNVFQTQAGCLIGAEHVDTSYECDIPIGAGICASYHTVSLLASTSQKSIVAYTMSLGADSSIAYSNNTIAIPTNFSISITTEVMPVSMAKTSVDCNMYICGDSTECANLLLQYGSFCTQLNRALSGIAAEQDRNTREVFAQVKQMYKTPTLKYFGGFNFSQILPDPLKPTKRSFIEDLLFNKVTLADAGFMKQYGECLGDINARDLICAQKFNGLTVLPPLLTDDMIAAYTAALVSGTATAGWTFGAGAALQIPFAMQMAYRFNGIGVTQNVLYENQKQIANQFNKAISQIQESLTTTSTALGKLQDVVNQNAQALNTLVKQLSSNFGAISSVLNDILSRLDPPEAEVQIDRLITGRLQSLQTYVTQQLIRAAEIRASANLAATKMSECVLGQSKRVDFCGKGYHLMSFPQAAPHGVVFLHVTYVPSQERNFTTAPAICHEGKAYFPREGVFVFNGTSWFITQRNFFSPQIITTDNTFVSGNCDVVIGIINNTVYDPLQPELDSFKEELDKYFKNHTSPDVDLGDISGINASVVNIQKEIDRLNEVAKNLNESLIDLQELGKYEQYIKWPWYVWLGFIAGLIAIVMVTILLSLWMCSNGSLQCRICI

SEQ ID NO: 96 - protein, 1240 aa, Artificial Sequence
  PDI-SARS-COV-1 H5iCT(V4)-AA
MAKNVAIFGLLFSLLVLVPSQIFASDLDRCTTFDDVQAPNYTQHTSSMRGVYYPDEIFRSDTLYLTQDLFLPFYSNVTGFHTINHTFGNPVIPFKDGIYFAATEKSNVVRGWVFGSTMNNKSQSVIIINNSTNVVIRACNFELCDNPFFAVSKPMGTQTHTMIFDNAFNCTFEYISDAFSLDVSEKSGNFKHLREFVFKNKDGFLYVYKGYQPIDVVRDLPSGFNTLKPIFKLPLGINITNFRAILTAFSPAQDIWGTSAAAYFVGYLKPTTFMLKYDENGTITDAVDCSQNPLAELKCSVKSFEIDKGIYQTSNFRVVPSGDVVRFPNITNLCPFGEVFNATKFPSVYAWERKKISNCVADYSVLYNSTFFSTFKCYGVSATKLNDLCFSNVYADSFVVKGDDVRQIAPGQTGVIADYNYKLPDDFMGCVLAWNTRNIDATSTGNYNYKYRYLRHGKLRPFERDISNVPFSPDGKPCTPPALNCYWPLNDYGFYTTTGIGYQPYRVVVLSFELLNAPATVCGPKLSTDLIKNQCVNFNFNGLTGTGVLTPSSKRFQPFQQFGRDVSDFTDSVRDPKTSEILDISPCSFGGVSVITPGTNASSEVAVLYQDVNCTDVSTAIHADQLTPAWRIYSTGNNVFQTQAGCLIGAEHVDTSYECDIPIGAGICASYHTVSLLASTSQKSIVAYTMSLGADSSIAYSNNTIAIPTNFSISITTEVMPVSMAKTSVDCNMYICGDSTECANLLLQYGSFCTQLNRALSGIAAEQDRNTREVFAQVKQMYKTPTLKYFGGFNFSQILPDPLKPTKRSFIEDLLFNKVTLADAGFMKQYGECLGDINARDLICAQKFNGLTVLPPLLTDDMIAAYTAALVSGTATAGWTFGAGAALQIPFAMQMAYRFNGIGVTQNVLYENQKQIANQFNKAISQIQESLTTTSTALGKLQDVVNQNAQALNTLVKQLSSNFGAISSVLNDILSRLDPPEAEVQIDRLITGRLQSLQTYVTQQLIRAAEIRASANLAATKMSECVLGQSKRVDFCGKGYHLMSFPQAAPHGVVFLHVTYVPSQERNFTTAPAICHEGKAYFPREGVFVFNGTSWFITQRNFFSPQIITTDNTFVSGNCDVVIGIINNTVYDPLQPELDSFKEELDKYFKNHTSPDVDLGDISGINASVVNIQKEIDRLNEVAKNLNESLIDLQELGKYEQYIKWPWYVWLGFIAGLIAIVMVTILLCCSNGSLQCRICI

SEQ ID NO: 97 - protein, 1243 aa, Artificial Sequence
  PDI-SARS-COV-1 H1cCT-AA
MAKNVAIFGLLFSLLVLVPSQIFASDLDRCTTFDDVQAPNYTQHTSSMRGVYYPDEIFRSDTLYLTQDLFLPFYSNVTGFHTINHTFGNPVIPFKDGIYFAATEKSNVVRGWVFGSTMNNKSQSVIIINNSTNVVIRACNFELCDNPFFAVSKPMGTQTHTMIFDNAFNCTFEYISDAFSLDVSEKSGNFKHLREFVFKNKDGFLYVYKGYQPIDVVRDLPSGFNTLKPIFKLPLGINITNFRAILTAFSPAQDIWGTSAAAYFVGYLKPTTFMLKYDENGTITDAVDCSQNPLAELKCSVKSFEIDKGIYQTSNFRVVPSGDVVRFPNITNLCPFGEVFNATKFPSVYAWERKKISNCVADYSVLYNSTFFSTFKCYGVSATKLNDLCFSNVYADSFVVKGDDVRQIAPGQTGVIADYNYKLPDDFMGCVLAWNTRNIDATSTGNYNYKYRYLRHGKLRPFERDISNVPFSPDGKPCTPPALNCYWPLNDYGFYTTTGIGYQPYRVVVLSFELLNAPATVCGPKLSTDLIKNQCVNFNFNGLTGTGVLTPSSKRFQPFQQFGRDVSDFTDSVRDPKTSEILDISPCSFGGVSVITPGTNASSEVAVLYQDVNCTDVSTAIHADQLTPAWRIYSTGNNVFQTQAGCLIGAEHVDTSYECDIPIGAGICASYHTVSLLASTSQKSIVAYTMSLGADSSIAYSNNTIAIPTNFSISITTEVMPVSMAKTSVDCNMYICGDSTECANLLLQYGSFCTQLNRALSGIAAEQDRNTREVFAQVKQMYKTPTLKYFGGFNFSQILPDPLKPTKRSFIEDLLFNKVTLADAGFMKQYGECLGDINARDLICAQKFNGLTVLPPLLTDDMIAAYTAALVSGTATAGWTFGAGAALQIPFAMQMAYRFNGIGVTQNVLYENQKQIANQFNKAISQIQESLTTTSTALGKLQDVVNQNAQALNTLVKQLSSNFGAISSVLNDILSRLDPPEAEVQIDRLITGRLQSLQTYVTQQLIRAAEIRASANLAATKMSECVLGQSKRVDFCGKGYHLMSFPQAAPHGVVFLHVTYVPSQERNFTTAPAICHEGKAYFPREGVFVFNGTSWFITQRNFFSPQIITTDNTFVSGNCDVVIGIINNTVYDPLQPELDSFKEELDKYFKNHTSPDVDLGDISGINASVVNIQKEIDRLNEVAKNLNESLIDLQELGKYEQYIKWPWYVWLGFIAGLIAIVMVTILLSFWMCSNGSLQCRICI

SEQ ID NO: 98 - DNA, 60 bp, Artificial Sequence
  IF(AvB+wtCT-MERS).r
acgacacgactaaggccttcagtgaacgtggaccttgtgaggctcaaggtcatactcctc

SEQ ID NO: 99 - DNA, 49 bp, Artificial Sequence
  IF(H1cCT-wtTM).r
acgacacgactaaggccttcaaatacatattctacactgtagagaccca

SEQ ID NO: 100 - DNA, 48 bp, Artificial Sequence
  IF(H5ITMCT).r
acgacacgactaaggccttcaaatgcaaattctgcattgtaacgatcc

SEQ ID NO: 101 - DNA, 4083 bp, Artificial Sequence
  PDI-MERS-wtTMCT-DNA
atggcgaaaaacgttgcgattttcggcttattgttttctcttcttgtgttggttccttctcagatcttcgcgtatgtcgatgtgggtcccgatagtgttaagtccgcctgcatcgaagtggacattcagcagaccttcttcgataagacttggcctcggccaattgatgtgtccaaggccgacggcattatctacccccaaggtcggacatattccaacataactatcacctatcaggggctattcccttatcagggcgaccatggggacatgtacgtttacagcgctggtcacgctacagggacgaccccccagaagctcttcgtggcgaactatagtcaggacgtgaaacagtttgccaacggttttgtagtgcgcatcggggcagccgctaactccactggtactgttattatcagcccttccacgagtgccacaattcgaaagatctatccggccttcatgctaggatcctctgtgggcaattttagcgacggtaagatgggtcggttcttcaaccacacgcttgtgctgcttcccgatgggtgcggtactttgctgagggccttttactgtatcctagagccccgatccggcaaccactgccccgccgggaactcgtatacttcctttgccacttatcatactccagccacggattgtagcgatgggaactacaataggaacgccagtttgaattcctttaaagagtacttcaacttgcggaattgtaccttcatgtatacatataacattactgaggacgaaattctcgaatggttcggaatcactcaaacagcccagggagtgcacctctttagttctcgctatgtggacttatatggaggcaatatgtttcaattcgccaccttacccgtctacgatacgatcaagtattactcgatcataccccactccattaggtccattcagagcgatcgcaaggcatgggccgcattctatgtgtataagctccagcccctgaccttcctcttggatttctccgtggacggctacatcagaagggctatcgattgcgggttcaacgacctcagccagctgcattgttcttatgagagctttgacgtggaaagcggagtttactcagtctcttcctttgaggctaaaccttcaggtagcgtcgtagagcaagcagagggtgtggagtgcgatttctcaccactgctcagcggaaccccaccccaggtctacaactttaagcggctcgtgttcacaaactgtaactataacttgactaagttgctgtcactcttttccgtgaatgattttacatgctcccaaatcagcccagccgctattgcgtctaattgctattcctcattgatcctggattacttcagttaccccctctctatgaagagcgatctctcggttagtagcgctgggcctatttcccagtttaactacaaacaatccttttccaatccaacatgcctgatcttagctactgtaccccacaacctgactactattacgaagccactcaagtactcatacattaataagtgcagccgattcctcagtgatgatcgcaccgaagtgccgcagcttgtaaacgcgaaccagtactccccatgcgtctctattgtgccttctacagtgtgggaagacggcgattattatagaaagcagctgtcgccactggaaggtggcgggtggctagttgccagtgggtccacagttgccatgaccgagcaacttcagatggggtttggcataacagtgcagtatggtaccgatacgaacagcgtgtgtccaaaattggaatttgctaacgacaccaagatcgcctcccagttgggaaattgtgttgaatattccctgtacggagtgtcaggccggggggtgttccaaaattgcaccgccgtgggagtgaggcagcaaagattcgtgtacgacgcataccagaatctagtcggatactattctgacgatggaaactactactgtctgcgcgcttgcgtctcagtgcccgtgagtgtcatatatgataaggagaccaagactcacgctactctctttggttctgtcgcgtgcgaacacatttcctctacaatgtcccagtatagtcgctccactcggtctatgttaaagcgcagagacagtacctacggccctctacagacacctgtggggtgcgttctcggccttgtcaattctagcctgtttgtggaggattgtaagctgccccttggtcaaagcttatgcgcactgcccgatacgcccagcacacttacaccagcttcagtggggtccgtccccggggaaatgagattggcctcgatcgctttcaaccaccccatacaggtggatcagctcaactcgtcatacttcaagctaagcatccctactaatttctcctttggtgtgactcaggagtacattcagaccacaattcaaaaggtgaccgttgactgcaagcagtatgtgtgcaacgggttccagaaatgtgaacagctgctccgggagtatggccagttctgttctaaaatcaaccaggccctccacggagcaaaccttaggcaggacgattctgtcagaaacctctttgccagcgtcaagagttctcagagttcccctattatacctggcttcggcggggatttcaacctgacactacttgaacctgtaagcatatcaaccggaagtcgcagtgcccgttccgccatcgaggatctgctcttcgacaaagtaactattgcagatcccggatacatgcaggggtatgacgactgcatgcagcagggtccagcctctgcaagggatctgatatgcgcacagtatgtcgctgggtacaaagtgttgcctcctctcatggacgtgaacatggaagcggcctatacctcctcacttctaggctccatagcgggcgtgggatggaccgcagggctttcaagcttcgccgcaattccctttgctcaatctatcttctacaggcttaatggcgttggaatcacccagcaggtgttaagcgaaaaccagaaattgattgccaataagtttaaccaagctttgggggccatgcagacaggctttacaaccacaaacgaggctttccataaagtacaggatgcggtaaacaataacgcacaagccctgtcaaagctggcttcagagctctcaaatacatttggcgctatatccgcgtctatcggcgatatcatacaacggttggacccacccgaacaggacgcacagattgatcgtttgatcaacgggaggcttaccaccttaaacgcttttgtggcccagcaactggtgcggtctgagagcgccgccttgagcgctcagctggcaaaggataaagtgaatgaatgcgtgaaagctcaatcaaagagaagtgggttttgtgggcagggtactcatattgtttcctttgtggtgaacgccccaaatggactctactttatgcatgttggatactacccgagcaaccacatcgaggtcgtttccgcctatgggctttgtgacgcagcaaaccctactaactgtatcgcgccagttaatggctactttattaaaacaaataacacacgcattgtggatgaatggagttacacagggtccagcttctacgctccagagcctatcacctctctgaacacaaagtatgtggcacctcaggtcacatatcagaacatctcgacaaacctgccccccccactcttgggcaactccacagggatcgacttccaggacgagcttgacgaattcttcaagaacgtgtccaccagtatccctaattttggttcgctgacccaaattaacacaaccctgctcgatctgacatatgaaatgctttcactacagcaggtggtcaaagcgttgaacgagtcgtatatcgacctgaaagagttagggaattacacatactataacaaatggccctggtatatttggttaggattcattgccgggctggtggcccttgccttgtgcgtatttttcatcttgtgctgtaccggttgcggtacgaattgcatgggaaaactgaaatgtaatcggtgctgcgatcgctatgaggagtatgaccttgagcctcacaaggtccacgttcactga

SEQ ID NO: 102 - DNA, 4032 bp, Artificial Sequence
  PDI-MERS-H5iTMCT-DNA
atggcgaaaaacgttgcgattttcggcttattgttttctcttcttgtgttggttccttctcagatcttcgcgtatgtcgatgtgggtcccgatagtgttaagtccgcctgcatcgaagtggacattcagcagaccttcttcgataagacttggcctcggccaattgatgtgtccaaggccgacggcattatctacccccaaggtcggacatattccaacataactatcacctatcaggggctattcccttatcagggcgaccatggggacatgtacgtttacagcgctggtcacgctacagggacgaccccccagaagctcttcgtggcgaactatagtcaggacgtgaaacagtttgccaacggttttgtagtgcgcatcggggcagccgctaactccactggtactgttattatcagcccttccacgagtgccacaattcgaaagatctatccggccttcatgctaggatcctctgtgggcaattttagcgacggtaagatgggtcggttcttcaaccacacgcttgtgctgcttcccgatgggtgcggtactttgctgagggccttttactgtatcctagagccccgatccggcaaccactgccccgccgggaactcgtatacttcctttgccacttatcatactccagccacggattgtagcgatgggaactacaataggaacgccagtttgaattcctttaaagagtacttcaacttgcggaattgtaccttcatgtatacatataacattactgaggacgaaattctcgaatggttcggaatcactcaaacagcccagggagtgcacctctttagttctcgctatgtggacttatatggaggcaatatgtttcaattcgccaccttacccgtctacgatacgatcaagtattactcgatcataccccactccattaggtccattcagagcgatcgcaaggcatgggccgcattctatgtgtataagctccagcccctgaccttcctcttggatttctccgtggacggctacatcagaagggctatcgattgcgggttcaacgacctcagccagctgcattgttcttatgagagctttgacgtggaaagcggagtttactcagtctcttcctttgaggctaaaccttcaggtagcgtcgtagagcaagcagagggtgtggagtgcgatttctcaccactgctcagcggaaccccaccccaggtctacaactttaagcggctcgtgttcacaaactgtaactataacttgactaagttgctgtcactcttttccgtgaatgattttacatgctcccaaatcagcccagccgctattgcgtctaattgctattcctcattgatcctggattacttcagttaccccctctctatgaagagcgatctctcggttagtagcgctgggcctatttcccagtttaactacaaacaatccttttccaatccaacatgcctgatcttagctactgtaccccacaacctgactactattacgaagccactcaagtactcatacattaataagtgcagccgattcctcagtgatgatcgcaccgaagtgccgcagcttgtaaacgcgaaccagtactccccatgcgtctctattgtgccttctacagtgtgggaagacggcgattattatagaaagcagctgtcgccactggaaggtggcgggtggctagttgccagtgggtccacagttgccatgaccgagcaacttcagatggggtttggcataacagtgcagtatggtaccgatacgaacagcgtgtgtccaaaattggaatttgctaacgacaccaagatcgcctcccagttgggaaattgtgttgaatattccctgtacggagtgtcaggccggggggtgttccaaaattgcaccgccgtgggagtgaggcagcaaagattcgtgtacgacgcataccagaatctagtcggatactattctgacgatggaaactactactgtctgcgcgcttgcgtctcagtgcccgtgagtgtcatatatgataaggagaccaagactcacgctactctctttggttctgtcgcgtgcgaacacatttcctctacaatgtcccagtatagtcgctccactcggtctatgttaaagcgcagagacagtacctacggccctctacagacacctgtggggtgcgttctcggccttgtcaattctagcctgtttgtggaggattgtaagctgccccttggtcaaagcttatgcgcactgcccgatacgcccagcacacttacaccagcttcagtggggtccgtccccggggaaatgagattggcctcgatcgctttcaaccaccccatacaggtggatcagctcaactcgtcatacttcaagctaagcatccctactaatttctcctttggtgtgactcaggagtacattcagaccacaattcaaaaggtgaccgttgactgcaagcagtatgtgtgcaacgggttccagaaatgtgaacagctgctccgggagtatggccagttctgttctaaaatcaaccaggccctccacggagcaaaccttaggcaggacgattctgtcagaaacctctttgccagcgtcaagagttctcagagttcccctattatacctggcttcggcggggatttcaacctgacactacttgaacctgtaagcatatcaaccggaagtcgcagtgcccgttccgccatcgaggatctgctcttcgacaaagtaactattgcagatcccggatacatgcaggggtatgacgactgcatgcagcagggtccagcctctgcaagggatctgatatgcgcacagtatgtcgctgggtacaaagtgttgcctcctctcatggacgtgaacatggaagcggcctatacctcctcacttctaggctccatagcgggcgtgggatggaccgcagggctttcaagcttcgccgcaattccctttgctcaatctatcttctacaggcttaatggcgttggaatcacccagcaggtgttaagcgaaaaccagaaattgattgccaataagtttaaccaagctttgggggccatgcagacaggctttacaaccacaaacgaggctttccataaagtacaggatgcggtaaacaataacgcacaagccctgtcaaagctggcttcagagctctcaaatacatttggcgctatatccgcgtctatcggcgatatcatacaacggttggacccacccgaacaggacgcacagattgatcgtttgatcaacgggaggcttaccaccttaaacgcttttgtggcccagcaactggtgcggtctgagagcgccgccttgagcgctcagctggcaaaggataaagtgaatgaatgcgtgaaagctcaatcaaagagaagtgggttttgtgggcagggtactcatattgtttcctttgtggtgaacgccccaaatggactctactttatgcatgttggatactacccgagcaaccacatcgaggtcgtttccgcctatgggctttgtgacgcagcaaaccctactaactgtatcgcgccagttaatggctactttattaaaacaaataacacacgcattgtggatgaatggagttacacagggtccagcttctacgctccagagcctatcacctctctgaacacaaagtatgtggcacctcaggtcacatatcagaacatctcgacaaacctgccccccccactcttgggcaactccacagggatcgacttccaggacgagcttgacgaattcttcaagaacgtgtccaccagtatccctaattttggttcgctgacccaaattaacacaaccctgctcgatctgacatatgaaatgctttcactacagcaggtggtcaaagcgttgaacgagtcgtatatcgacctgaaagagttagggaattacacatactataacaaatggccctggtatcaaatactgtcaatttattcaacagtggcgagttccctagcactggcaatcatgatggctggtctatctttatggatgtgctccaatggatcgttacaatgcagaatttgcatttga

SEQ ID NO: 103 - DNA, 4026 bp, Artificial Sequence
  PDI-MERS-H5iCT-DNA
atggcgaaaaacgttgcgattttcggcttattgttttctcttcttgtgttggttccttctcagatcttcgcgtatgtcgatgtgggtcccgatagtgttaagtccgcctgcatcgaagtggacattcagcagaccttcttcgataagacttggcctcggccaattgatgtgtccaaggccgacggcattatctacccccaaggtcggacatattccaacataactatcacctatcaggggctattcccttatcagggcgaccatggggacatgtacgtttacagcgctggtcacgctacagggacgaccccccagaagctcttcgtggcgaactatagtcaggacgtgaaacagtttgccaacggttttgtagtgcgcatcggggcagccgctaactccactggtactgttattatcagcccttccacgagtgccacaattcgaaagatctatccggccttcatgctaggatcctctgtgggcaattttagcgacggtaagatgggtcggttcttcaaccacacgcttgtgctgcttcccgatgggtgcggtactttgctgagggccttttactgtatcctagagccccgatccggcaaccactgccccgccgggaactcgtatacttcctttgccacttatcatactccagccacggattgtagcgatgggaactacaataggaacgccagtttgaattcctttaaagagtacttcaacttgcggaattgtaccttcatgtatacatataacattactgaggacgaaattctcgaatggttcggaatcactcaaacagcccagggagtgcacctctttagttctcgctatgtggacttatatggaggcaatatgtttcaattcgccaccttacccgtctacgatacgatcaagtattactcgatcataccccactccattaggtccattcagagcgatcgcaaggcatgggccgcattctatgtgtataagctccagcccctgaccttcctcttggatttctccgtggacggctacatcagaagggctatcgattgcgggttcaacgacctcagccagctgcattgttcttatgagagctttgacgtggaaagcggagtttactcagtctcttcctttgaggctaaaccttcaggtagcgtcgtagagcaagcagagggtgtggagtgcgatttctcaccactgctcagcggaaccccaccccaggtctacaactttaagcggctcgtgttcacaaactgtaactataacttgactaagttgctgtcactcttttccgtgaatgattttacatgctcccaaatcagcccagccgctattgcgtctaattgctattcctcattgatcctggattacttcagttaccccctctctatgaagagcgatctctcggttagtagcgctgggcctatttcccagtttaactacaaacaatccttttccaatccaacatgcctgatcttagctactgtaccccacaacctgactactattacgaagccactcaagtactcatacattaataagtgcagccgattcctcagtgatgatcgcaccgaagtgccgcagcttgtaaacgcgaaccagtactccccatgcgtctctattgtgccttctacagtgtgggaagacggcgattattatagaaagcagctgtcgccactggaaggtggcgggtggctagttgccagtgggtccacagttgccatgaccgagcaacttcagatggggtttggcataacagtgcagtatggtaccgatacgaacagcgtgtgtccaaaattggaatttgctaacgacaccaagatcgcctcccagttgggaaattgtgttgaatattccctgtacggagtgtcaggccggggggtgttccaaaattgcaccgccgtgggagtgaggcagcaaagattcgtgtacgacgcataccagaatctagtcggatactattctgacgatggaaactactactgtctgcgcgcttgcgtctcagtgcccgtgagtgtcatatatgataaggagaccaagactcacgctactctctttggttctgtcgcgtgcgaacacatttcctctacaatgtcccagtatagtcgctccactcggtctatgttaaagcgcagagacagtacctacggccctctacagacacctgtggggtgcgttctcggccttgtcaattctagcctgtttgtggaggattgtaagctgccccttggtcaaagcttatgcgcactgcccgatacgcccagcacacttacaccagcttcagtggggtccgtccccggggaaatgagattggcctcgatcgctttcaaccaccccatacaggtggatcagctcaactcgtcatacttcaagctaagcatccctactaatttctcctttggtgtgactcaggagtacattcagaccacaattcaaaaggtgaccgttgactgcaagcagtatgtgtgcaacgggttccagaaatgtgaacagctgctccgggagtatggccagttctgttctaaaatcaaccaggccctccacggagcaaaccttaggcaggacgattctgtcagaaacctctttgccagcgtcaagagttctcagagttcccctattatacctggcttcggcggggatttcaacctgacactacttgaacctgtaagcatatcaaccggaagtcgcagtgcccgttccgccatcgaggatctgctcttcgacaaagtaactattgcagatcccggatacatgcaggggtatgacgactgcatgcagcagggtccagcctctgcaagggatctgatatgcgcacagtatgtcgctgggtacaaagtgttgcctcctctcatggacgtgaacatggaagcggcctatacctcctcacttctaggctccatagcgggcgtgggatggaccgcagggctttcaagcttcgccgcaattccctttgctcaatctatcttctacaggcttaatggcgttggaatcacccagcaggtgttaagcgaaaaccagaaattgattgccaataagtttaaccaagctttgggggccatgcagacaggctttacaaccacaaacgaggctttccataaagtacaggatgcggtaaacaataacgcacaagccctgtcaaagctggcttcagagctctcaaatacatttggcgctatatccgcgtctatcggcgatatcatacaacggttggacccacccgaacaggacgcacagattgatcgtttgatcaacgggaggcttaccaccttaaacgcttttgtggcccagcaactggtgcggtctgagagcgccgccttgagcgctcagctggcaaaggataaagtgaatgaatgcgtgaaagctcaatcaaagagaagtgggttttgtgggcagggtactcatattgtttcctttgtggtgaacgccccaaatggactctactttatgcatgttggatactacccgagcaaccacatcgaggtcgtttccgcctatgggctttgtgacgcagcaaaccctactaactgtatcgcgccagttaatggctactttattaaaacaaataacacacgcattgtggatgaatggagttacacagggtccagcttctacgctccagagcctatcacctctctgaacacaaagtatgtggcacctcaggtcacatatcagaacatctcgacaaacctgccccccccactcttgggcaactccacagggatcgacttccaggacgagcttgacgaattcttcaagaacgtgtccaccagtatccctaattttggttcgctgacccaaattaacacaaccctgctcgatctgacatatgaaatgctttcactacagcaggtggtcaaagcgttgaacgagtcgtatatcgacctgaaagagttagggaattacacatactataacaaatggccctggtatatttggttaggattcattgccgggctggtggcccttgccttgtgcgtatttttcatcttgtctttatggatgtgctccaatggatcgttacaatgcagaatttgcatttga

SEQ ID NO: 104 - DNA, 4017 bp, Artificial Sequence
  PDI-MERS-H5iCT(V4)-DNA
atggcgaaaaacgttgcgattttcggcttattgttttctcttcttgtgttggttccttctcagatcttcgcgtatgtcgatgtgggtcccgatagtgttaagtccgcctgcatcgaagtggacattcagcagaccttcttcgataagacttggcctcggccaattgatgtgtccaaggccgacggcattatctacccccaaggtcggacatattccaacataactatcacctatcaggggctattcccttatcagggcgaccatggggacatgtacgtttacagcgctggtcacgctacagggacgaccccccagaagctcttcgtggcgaactatagtcaggacgtgaaacagtttgccaacggttttgtagtgcgcatcggggcagccgctaactccactggtactgttattatcagcccttccacgagtgccacaattcgaaagatctatccggccttcatgctaggatcctctgtgggcaattttagcgacggtaagatgggtcggttcttcaaccacacgcttgtgctgcttcccgatgggtgcggtactttgctgagggccttttactgtatcctagagccccgatccggcaaccactgccccgccgggaactcgtatacttcctttgccacttatcatactccagccacggattgtagcgatgggaactacaataggaacgccagtttgaattcctttaaagagtacttcaacttgcggaattgtaccttcatgtatacatataacattactgaggacgaaattctcgaatggttcggaatcactcaaacagcccagggagtgcacctctttagttctcgctatgtggacttatatggaggcaatatgtttcaattcgccaccttacccgtctacgatacgatcaagtattactcgatcataccccactccattaggtccattcagagcgatcgcaaggcatgggccgcattctatgtgtataagctccagcccctgaccttcctcttggatttctccgtggacggctacatcagaagggctatcgattgcgggttcaacgacctcagccagctgcattgttcttatgagagctttgacgtggaaagcggagtttactcagtctcttcctttgaggctaaaccttcaggtagcgtcgtagagcaagcagagggtgtggagtgcgatttctcaccactgctcagcggaaccccaccccaggtctacaactttaagcggctcgtgttcacaaactgtaactataacttgactaagttgctgtcactcttttccgtgaatgattttacatgctcccaaatcagcccagccgctattgcgtctaattgctattcctcattgatcctggattacttcagttaccccctctctatgaagagcgatctctcggttagtagcgctgggcctatttcccagtttaactacaaacaatccttttccaatccaacatgcctgatcttagctactgtaccccacaacctgactactattacgaagccactcaagtactcatacattaataagtgcagccgattcctcagtgatgatcgcaccgaagtgccgcagcttgtaaacgcgaaccagtactccccatgcgtctctattgtgccttctacagtgtgggaagacggcgattattatagaaagcagctgtcgccactggaaggtggcgggtggctagttgccagtgggtccacagttgccatgaccgagcaacttcagatggggtttggcataacagtgcagtatggtaccgatacgaacagcgtgtgtccaaaattggaatttgctaacgacaccaagatcgcctcccagttgggaaattgtgttgaatattccctgtacggagtgtcaggccggggggtgttccaaaattgcaccgccgtgggagtgaggcagcaaagattcgtgtacgacgcataccagaatctagtcggatactattctgacgatggaaactactactgtctgcgcgcttgcgtctcagtgcccgtgagtgtcatatatgataaggagaccaagactcacgctactctctttggttctgtcgcgtgcgaacacatttcctctacaatgtcccagtatagtcgctccactcggtctatgttaaagcgcagagacagtacctacggccctctacagacacctgtggggtgcgttctcggccttgtcaattctagcctgtttgtggaggattgtaagctgccccttggtcaaagcttatgcgcactgcccgatacgcccagcacacttacaccagcttcagtggggtccgtccccggggaaatgagattggcctcgatcgctttcaaccaccccatacaggtggatcagctcaactcgtcatacttcaagctaagcatccctactaatttctcctttggtgtgactcaggagtacattcagaccacaattcaaaaggtgaccgttgactgcaagcagtatgtgtgcaacgggttccagaaatgtgaacagctgctccgggagtatggccagttctgttctaaaatcaaccaggccctccacggagcaaaccttaggcaggacgattctgtcagaaacctctttgccagcgtcaagagttctcagagttcccctattatacctggcttcggcggggatttcaacctgacactacttgaacctgtaagcatatcaaccggaagtcgcagtgcccgttccgccatcgaggatctgctcttcgacaaagtaactattgcagatcccggatacatgcaggggtatgacgactgcatgcagcagggtccagcctctgcaagggatctgatatgcgcacagtatgtcgctgggtacaaagtgttgcctcctctcatggacgtgaacatggaagcggcctatacctcctcacttctaggctccatagcgggcgtgggatggaccgcagggctttcaagcttcgccgcaattccctttgctcaatctatcttctacaggcttaatggcgttggaatcacccagcaggtgttaagcgaaaaccagaaattgattgccaataagtttaaccaagctttgggggccatgcagacaggctttacaaccacaaacgaggctttccataaagtacaggatgcggtaaacaataacgcacaagccctgtcaaagctggcttcagagctctcaaatacatttggcgctatatccgcgtctatcggcgatatcatacaacggttggacccacccgaacaggacgcacagattgatcgtttgatcaacgggaggcttaccaccttaaacgcttttgtggcccagcaactggtgcggtctgagagcgccgccttgagcgctcagctggcaaaggataaagtgaatgaatgcgtgaaagctcaatcaaagagaagtgggttttgtgggcagggtactcatattgtttcctttgtggtgaacgccccaaatggactctactttatgcatgttggatactacccgagcaaccacatcgaggtcgtttccgcctatgggctttgtgacgcagcaaaccctactaactgtatcgcgccagttaatggctactttattaaaacaaataacacacgcattgtggatgaatggagttacacagggtccagcttctacgctccagagcctatcacctctctgaacacaaagtatgtggcacctcaggtcacatatcagaacatctcgacaaacctgccccccccactcttgggcaactccacagggatcgacttccaggacgagcttgacgaattcttcaagaacgtgtccaccagtatccctaattttggttcgctgacccaaattaacacaaccctgctcgatctgacatatgaaatgctttcactacagcaggtggtcaaagcgttgaacgagtcgtatatcgacctgaaagagttagggaattacacatactataacaaatggccctggtatatttggttaggattcattgccgggctggtggcccttgccttgtgcgtatttttcatcttgtgctgctccaatggatcgttacaatgcagaatttgcatttga

SEQ ID NO: 105 - DNA, 4026 bp, Artificial Sequence
  PDI-MERS-H1cCT-DNA
atggcgaaaaacgttgcgattttcggcttattgttttctcttcttgtgttggttccttctcagatcttcgcgtatgtcgatgtgggtcccgatagtgttaagtccgcctgcatcgaagtggacattcagcagaccttcttcgataagacttggcctcggccaattgatgtgtccaaggccgacggcattatctacccccaaggtcggacatattccaacataactatcacctatcaggggctattcccttatcagggcgaccatggggacatgtacgtttacagcgctggtcacgctacagggacgaccccccagaagctcttcgtggcgaactatagtcaggacgtgaaacagtttgccaacggttttgtagtgcgcatcggggcagccgctaactccactggtactgttattatcagcccttccacgagtgccacaattcgaaagatctatccggccttcatgctaggatcctctgtgggcaattttagcgacggtaagatgggtcggttcttcaaccacacgcttgtgctgcttcccgatgggtgcggtactttgctgagggccttttactgtatcctagagccccgatccggcaaccactgccccgccgggaactcgtatacttcctttgccacttatcatactccagccacggattgtagcgatgggaactacaataggaacgccagtttgaattcctttaaagagtacttcaacttgcggaattgtaccttcatgtatacatataacattactgaggacgaaattctcgaatggttcggaatcactcaaacagcccagggagtgcacctctttagttctcgctatgtggacttatatggaggcaatatgtttcaattcgccaccttacccgtctacgatacgatcaagtattactcgatcataccccactccattaggtccattcagagcgatcgcaaggcatgggccgcattctatgtgtataagctccagcccctgaccttcctcttggatttctccgtggacggctacatcagaagggctatcgattgcgggttcaacgacctcagccagctgcattgttcttatgagagctttgacgtggaaagcggagtttactcagtctcttcctttgaggctaaaccttcaggtagcgtcgtagagcaagcagagggtgtggagtgcgatttctcaccactgctcagcggaaccccaccccaggtctacaactttaagcggctcgtgttcacaaactgtaactataacttgactaagttgctgtcactcttttccgtgaatgattttacatgctcccaaatcagcccagccgctattgcgtctaattgctattcctcattgatcctggattacttcagttaccccctctctatgaagagcgatctctcggttagtagcgctgggcctatttcccagtttaactacaaacaatccttttccaatccaacatgcctgatcttagctactgtaccccacaacctgactactattacgaagccactcaagtactcatacattaataagtgcagccgattcctcagtgatgatcgcaccgaagtgccgcagcttgtaaacgcgaaccagtactccccatgcgtctctattgtgccttctacagtgtgggaagacggcgattattatagaaagcagctgtcgccactggaaggtggcgggtggctagttgccagtgggtccacagttgccatgaccgagcaacttcagatggggtttggcataacagtgcagtatggtaccgatacgaacagcgtgtgtccaaaattggaatttgctaacgacaccaagatcgcctcccagttgggaaattgtgttgaatattccctgtacggagtgtcaggccggggggtgttccaaaattgcaccgccgtgggagtgaggcagcaaagattcgtgtacgacgcataccagaatctagtcggatactattctgacgatggaaactactactgtctgcgcgcttgcgtctcagtgcccgtgagtgtcatatatgataaggagaccaagactcacgctactctctttggttctgtcgcgtgcgaacacatttcctctacaatgtcccagtatagtcgctccactcggtctatgttaaagcgcagagacagtacctacggccctctacagacacctgtggggtgcgttctcggccttgtcaattctagcctgtttgtggaggattgtaagctgccccttggtcaaagcttatgcgcactgcccgatacgcccagcacacttacaccagcttcagtggggtccgtccccggggaaatgagattggcctcgatcgctttcaaccaccccatacaggtggatcagctcaactcgtcatacttcaagctaagcatccctactaatttctcctttggtgtgactcaggagtacattcagaccacaattcaaaaggtgaccgttgactgcaagcagtatgtgtgcaacgggttccagaaatgtgaacagctgctccgggagtatggccagttctgttctaaaatcaaccaggccctccacggagcaaaccttaggcaggacgattctgtcagaaacctctttgccagcgtcaagagttctcagagttcccctattatacctggcttcggcggggatttcaacctgacactacttgaacctgtaagcatatcaaccggaagtcgcagtgcccgttccgccatcgaggatctgctcttcgacaaagtaactattgcagatcccggatacatgcaggggtatgacgactgcatgcagcagggtccagcctctgcaagggatctgatatgcgcacagtatgtcgctgggtacaaagtgttgcctcctctcatggacgtgaacatggaagcggcctatacctcctcacttctaggctccatagcgggcgtgggatggaccgcagggctttcaagcttcgccgcaattccctttgctcaatctatcttctacaggcttaatggcgttggaatcacccagcaggtgttaagcgaaaaccagaaattgattgccaataagtttaaccaagctttgggggccatgcagacaggctttacaaccacaaacgaggctttccataaagtacaggatgcggtaaacaataacgcacaagccctgtcaaagctggcttcagagctctcaaatacatttggcgctatatccgcgtctatcggcgatatcatacaacggttggacccacccgaacaggacgcacagattgatcgtttgatcaacgggaggcttaccaccttaaacgcttttgtggcccagcaactggtgcggtctgagagcgccgccttgagcgctcagctggcaaaggataaagtgaatgaatgcgtgaaagctcaatcaaagagaagtgggttttgtgggcagggtactcatattgtttcctttgtggtgaacgccccaaatggactctactttatgcatgttggatactacccgagcaaccacatcgaggtcgtttccgcctatgggctttgtgacgcagcaaaccctactaactgtatcgcgccagttaatggctactttattaaaacaaataacacacgcattgtggatgaatggagttacacagggtccagcttctacgctccagagcctatcacctctctgaacacaaagtatgtggcacctcaggtcacatatcagaacatctcgacaaacctgccccccccactcttgggcaactccacagggatcgacttccaggacgagcttgacgaattcttcaagaacgtgtccaccagtatccctaattttggttcgctgacccaaattaacacaaccctgctcgatctgacatatgaaatgctttcactacagcaggtggtcaaagcgttgaacgagtcgtatatcgacctgaaagagttagggaattacacatactataacaaatggccctggtatatttggttaggattcattgccgggctggtggcccttgccttgtgcgtatttttcatcttgagcttctggatgtgctctaatgggtctctacagtgtagaatatgtatttga

SEQ ID NO: 106 - protein, 1360 aa, Artificial Sequence
  PDI-MERS-wtTMCT-AA
MAKNVAIFGLLFSLLVLVPSQIFAYVDVGPDSVKSACIEVDIQQTFFDKTWPRPIDVSKADGIIYPQGRTYSNITITYQGLFPYQGDHGDMYVYSAGHATGTTPQKLFVANYSQDVKQFANGFVVRIGAAANSTGTVIISPSTSATIRKIYPAFMLGSSVGNFSDGKMGRFFNHTLVLLPDGCGTLLRAFYCILEPRSGNHCPAGNSYTSFATYHTPATDCSDGNYNRNASLNSFKEYFNLRNCTFMYTYNITEDEILEWFGITQTAQGVHLFSSRYVDLYGGNMFQFATLPVYDTIKYYSIIPHSIRSIQSDRKAWAAFYVYKLQPLTFLLDFSVDGYIRRAIDCGFNDLSQLHCSYESFDVESGVYSVSSFEAKPSGSVVEQAEGVECDFSPLLSGTPPQVYNFKRLVFTNCNYNLTKLLSLFSVNDFTCSQISPAAIASNCYSSLILDYFSYPLSMKSDLSVSSAGPISQFNYKQSFSNPTCLILATVPHNLTTITKPLKYSYINKCSRFLSDDRTEVPQLVNANQYSPCVSIVPSTVWEDGDYYRKQLSPLEGGGWLVASGSTVAMTEQLQMGFGITVQYGTDTNSVCPKLEFANDTKIASQLGNCVEYSLYGVSGRGVFQNCTAVGVRQQRFVYDAYQNLVGYYSDDGNYYCLRACVSVPVSVIYDKETKTHATLFGSVACEHISSTMSQYSRSTRSMLKRRDSTYGPLQTPVGCVLGLVNSSLFVEDCKLPLGQSLCALPDTPSTLTPASVGSVPGEMRLASIAFNHPIQVDQLNSSYFKLSIPTNFSFGVTQEYIQTTIQKVTVDCKQYVCNGFQKCEQLLREYGQFCSKINQALHGANLRQDDSVRNLFASVKSSQSSPIIPGFGGDFNLTLLEPVSISTGSRSARSAIEDLLFDKVTIADPGYMQGYDDCMQQGPASARDLICAQYVAGYKVLPPLMDVNMEAAYTSSLLGSIAGVGWTAGLSSFAAIPFAQSIFYRLNGVGITQQVLSENQKLIANKFNQALGAMQTGFTTTNEAFHKVQDAVNNNAQALSKLASELSNTFGAISASIGDIIQRLDPPEQDAQIDRLINGRLTTLNAFVAQQLVRSESAALSAQLAKDKVNECVKAQSKRSGFCGQGTHIVSFVVNAPNGLYFMHVGYYPSNHIEVVSAYGLCDAANPTNCIAPVNGYFIKTNNTRIVDEWSYTGSSFYAPEPITSLNTKYVAPQVTYQNISTNLPPPLLGNSTGIDFQDELDEFFKNVSTSIPNFGSLTQINTTLLDLTYEMLSLQQVVKALNESYIDLKELGNYTYYNKWPWYIWLGFIAGLVALALCVFFILCCTGCGTNCMGKLKCNRCCDRYEEYDLEPHKVHVH

SEQ ID NO: 107 - protein, 1343 aa, Artificial Sequence
  PDI-MERS-H5iTMCT-AA
MAKNVAIFGLLFSLLVLVPSQIFAYVDVGPDSVKSACIEVDIQQTFFDKTWPRPIDVSKADGIIYPQGRTYSNITITYQGLFPYQGDHGDMYVYSAGHATGTTPQKLFVANYSQDVKQFANGFVVRIGAAANSTGTVIISPSTSATIRKIYPAFMLGSSVGNFSDGKMGRFFNHTLVLLPDGCGTLLRAFYCILEPRSGNHCPAGNSYTSFATYHTPATDCSDGNYNRNASLNSFKEYFNLRNCTFMYTYNITEDEILEWFGITQTAQGVHLFSSRYVDLYGGNMFQFATLPVYDTIKYYSIIPHSIRSIQSDRKAWAAFYVYKLQPLTFLLDFSVDGYIRRAIDCGFNDLSQLHCSYESFDVESGVYSVSSFEAKPSGSVVEQAEGVECDFSPLLSGTPPQVYNFKRLVFTNCNYNLTKLLSLFSVNDFTCSQISPAAIASNCYSSLILDYFSYPLSMKSDLSVSSAGPISQFNYKQSFSNPTCLILATVPHNLTTITKPLKYSYINKCSRFLSDDRTEVPQLVNANQYSPCVSIVPSTVWEDGDYYRKQLSPLEGGGWLVASGSTVAMTEQLQMGFGITVQYGTDTNSVCPKLEFANDTKIASQLGNCVEYSLYGVSGRGVFQNCTAVGVRQQRFVYDAYQNLVGYYSDDGNYYCLRACVSVPVSVIYDKETKTHATLFGSVACEHISSTMSQYSRSTRSMLKRRDSTYGPLQTPVGCVLGLVNSSLFVEDCKLPLGQSLCALPDTPSTLTPASVGSVPGEMRLASIAFNHPIQVDQLNSSYFKLSIPTNFSFGVTQEYIQTTIQKVTVDCKQYVCNGFQKCEQLLREYGQFCSKINQALHGANLRQDDSVRNLFASVKSSQSSPIIPGFGGDFNLTLLEPVSISTGSRSARSAIEDLLFDKVTIADPGYMQGYDDCMQQGPASARDLICAQYVAGYKVLPPLMDVNMEAAYTSSLLGSIAGVGWTAGLSSFAAIPFAQSIFYRLNGVGITQQVLSENQKLIANKFNQALGAMQTGFTTTNEAFHKVQDAVNNNAQALSKLASELSNTFGAISASIGDIIQRLDPPEQDAQIDRLINGRLTTLNAFVAQQLVRSESAALSAQLAKDKVNECVKAQSKRSGFCGQGTHIVSFVVNAPNGLYFMHVGYYPSNHIEVVSAYGLCDAANPTNCIAPVNGYFIKTNNTRIVDEWSYTGSSFYAPEPITSLNTKYVAPQVTYQNISTNLPPPLLGNSTGIDFQDELDEFFKNVSTSIPNFGSLTQINTTLLDLTYEMLSLQQVVKALNESYIDLKELGNYTYYNKWPWYQILSIYSTVASSLALAIMMAGLSLWMCSNGSLQCRICI

SEQ ID NO: 108 - protein, 1341 aa, Artificial Sequence
  PDI-MERS-H5iCT-AA
MAKNVAIFGLLFSLLVLVPSQIFAYVDVGPDSVKSACIEVDIQQTFFDKTWPRPIDVSKADGIIYPQGRTYSNITITYQGLFPYQGDHGDMYVYSAGHATGTTPQKLFVANYSQDVKQFANGFVVRIGAAANSTGTVIISPSTSATIRKIYPAFMLGSSVGNFSDGKMGRFFNHTLVLLPDGCGTLLRAFYCILEPRSGNHCPAGNSYTSFATYHTPATDCSDGNYNRNASLNSFKEYFNLRNCTFMYTYNITEDEILEWFGITQTAQGVHLFSSRYVDLYGGNMFQFATLPVYDTIKYYSIIPHSIRSIQSDRKAWAAFYVYKLQPLTFLLDFSVDGYIRRAIDCGFNDLSQLHCSYESFDVESGVYSVSSFEAKPSGSVVEQAEGVECDFSPLLSGTPPQVYNFKRLVFTNCNYNLTKLLSLFSVNDFTCSQISPAAIASNCYSSLILDYFSYPLSMKSDLSVSSAGPISQFNYKQSFSNPTCLILATVPHNLTTITKPLKYSYINKCSRFLSDDRTEVPQLVNANQYSPCVSIVPSTVWEDGDYYRKQLSPLEGGGWLVASGSTVAMTEQLQMGFGITVQYGTDTNSVCPKLEFANDTKIASQLGNCVEYSLYGVSGRGVFQNCTAVGVRQQRFVYDAYQNLVGYYSDDGNYYCLRACVSVPVSVIYDKETKTHATLFGSVACEHISSTMSQYSRSTRSMLKRRDSTYGPLQTPVGCVLGLVNSSLFVEDCKLPLGQSLCALPDTPSTLTPASVGSVPGEMRLASIAFNHPIQVDQLNSSYFKLSIPTNFSFGVTQEYIQTTIQKVTVDCKQYVCNGFQKCEQLLREYGQFCSKINQALHGANLRQDDSVRNLFASVKSSQSSPIIPGFGGDFNLTLLEPVSISTGSRSARSAIEDLLFDKVTIADPGYMQGYDDCMQQGPASARDLICAQYVAGYKVLPPLMDVNMEAAYTSSLLGSIAGVGWTAGLSSFAAIPFAQSIFYRLNGVGITQQVLSENQKLIANKFNQALGAMQTGFTTTNEAFHKVQDAVNNNAQALSKLASELSNTFGAISASIGDIIQRLDPPEQDAQIDRLINGRLTTLNAFVAQQLVRSESAALSAQLAKDKVNECVKAQSKRSGFCGQGTHIVSFVVNAPNGLYFMHVGYYPSNHIEVVSAYGLCDAANPTNCIAPVNGYFIKTNNTRIVDEWSYTGSSFYAPEPITSLNTKYVAPQVTYQNISTNLPPPLLGNSTGIDFQDELDEFFKNVSTSIPNFGSLTQINTTLLDLTYEMLSLQQVVKALNESYIDLKELGNYTYYNKWPWYIWLGFIAGLVALALCVFFILSLWMCSNGSLQCRICI

SEQ ID NO: 109 - protein, 1338 aa, Artificial Sequence
  PDI-MERS-H5iCT(V4)-AA
MAKNVAIFGLLFSLLVLVPSQIFAYVDVGPDSVKSACIEVDIQQTFFDKTWPRPIDVSKADGIIYPQGRTYSNITITYQGLFPYQGDHGDMYVYSAGHATGTTPQKLFVANYSQDVKQFANGFVVRIGAAANSTGTVIISPSTSATIRKIYPAFMLGSSVGNFSDGKMGRFFNHTLVLLPDGCGTLLRAFYCILEPRSGNHCPAGNSYTSFATYHTPATDCSDGNYNRNASLNSFKEYFNLRNCTFMYTYNITEDEILEWFGITQTAQGVHLFSSRYVDLYGGNMFQFATLPVYDTIKYYSIIPHSIRSIQSDRKAWAAFYVYKLQPLTFLLDFSVDGYIRRAIDCGFNDLSQLHCSYESFDVESGVYSVSSFEAKPSGSVVEQAEGVECDFSPLLSGTPPQVYNFKRLVFTNCNYNLTKLLSLFSVNDFTCSQISPAAIASNCYSSLILDYFSYPLSMKSDLSVSSAGPISQFNYKQSFSNPTCLILATVPHNLTTITKPLKYSYINKCSRFLSDDRTEVPQLVNANQYSPCVSIVPSTVWEDGDYYRKQLSPLEGGGWLVASGSTVAMTEQLQMGFGITVQYGTDTNSVCPKLEFANDTKIASQLGNCVEYSLYGVSGRGVFQNCTAVGVRQQRFVYDAYQNLVGYYSDDGNYYCLRACVSVPVSVIYDKETKTHATLFGSVACEHISSTMSQYSRSTRSMLKRRDSTYGPLQTPVGCVLGLVNSSLFVEDCKLPLGQSLCALPDTPSTLTPASVGSVPGEMRLASIAFNHPIQVDQLNSSYFKLSIPTNFSFGVTQEYIQTTIQKVTVDCKQYVCNGFQKCEQLLREYGQFCSKINQALHGANLRQDDSVRNLFASVKSSQSSPIIPGFGGDFNLTLLEPVSISTGSRSARSAIEDLLFDKVTIADPGYMQGYDDCMQQGPASARDLICAQYVAGYKVLPPLMDVNMEAAYTSSLLGSIAGVGWTAGLSSFAAIPFAQSIFYRLNGVGITQQVLSENQKLIANKFNQALGAMQTGFTTTNEAFHKVQDAVNNNAQALSKLASELSNTFGAISASIGDIIQRLDPPEQDAQIDRLINGRLTTLNAFVAQQLVRSESAALSAQLAKDKVNECVKAQSKRSGFCGQGTHIVSFVVNAPNGLYFMHVGYYPSNHIEVVSAYGLCDAANPTNCIAPVNGYFIKTNNTRIVDEWSYTGSSFYAPEPITSLNTKYVAPQVTYQNISTNLPPPLLGNSTGIDFQDELDEFFKNVSTSIPNFGSLTQINTTLLDLTYEMLSLQQVVKALNESYIDLKELGNYTYYNKWPWYIWLGFIAGLVALALCVFFILCCSNGSLQCRICI

SEQ ID NO: 110 - protein, 1341 aa, Artificial Sequence
  PDI-MERS-H1cCT-AA
MAKNVAIFGLLFSLLVLVPSQIFAYVDVGPDSVKSACIEVDIQQTFFDKTWPRPIDVSKADGIIYPQGRTYSNITITYQGLFPYQGDHGDMYVYSAGHATGTTPQKLFVANYSQDVKQFANGFVVRIGAAANSTGTVIISPSTSATIRKIYPAFMLGSSVGNFSDGKMGRFFNHTLVLLPDGCGTLLRAFYCILEPRSGNHCPAGNSYTSFATYHTPATDCSDGNYNRNASLNSFKEYFNLRNCTFMYTYNITEDEILEWFGITQTAQGVHLFSSRYVDLYGGNMFQFATLPVYDTIKYYSIIPHSIRSIQSDRKAWAAFYVYKLQPLTFLLDFSVDGYIRRAIDCGFNDLSQLHCSYESFDVESGVYSVSSFEAKPSGSVVEQAEGVECDFSPLLSGTPPQVYNFKRLVFTNCNYNLTKLLSLFSVNDFTCSQISPAAIASNCYSSLILDYFSYPLSMKSDLSVSSAGPISQFNYKQSFSNPTCLILATVPHNLTTITKPLKYSYINKCSRFLSDDRTEVPQLVNANQYSPCVSIVPSTVWEDGDYYRKQLSPLEGGGWLVASGSTVAMTEQLQMGFGITVQYGTDTNSVCPKLEFANDTKIASQLGNCVEYSLYGVSGRGVFQNCTAVGVRQQRFVYDAYQNLVGYYSDDGNYYCLRACVSVPVSVIYDKETKTHATLFGSVACEHISSTMSQYSRSTRSMLKRRDSTYGPLQTPVGCVLGLVNSSLFVEDCKLPLGQSLCALPDTPSTLTPASVGSVPGEMRLASIAFNHPIQVDQLNSSYFKLSIPTNFSFGVTQEYIQTTIQKVTVDCKQYVCNGFQKCEQLLREYGQFCSKINQALHGANLRQDDSVRNLFASVKSSQSSPIIPGFGGDFNLTLLEPVSISTGSRSARSAIEDLLFDKVTIADPGYMQGYDDCMQQGPASARDLICAQYVAGYKVLPPLMDVNMEAAYTSSLLGSIAGVGWTAGLSSFAAIPFAQSIFYRLNGVGITQQVLSENQKLIANKFNQALGAMQTGFTTTNEAFHKVQDAVNNNAQALSKLASELSNTFGAISASIGDIIQRLDPPEQDAQIDRLINGRLTTLNAFVAQQLVRSESAALSAQLAKDKVNECVKAQSKRSGFCGQGTHIVSFVVNAPNGLYFMHVGYYPSNHIEVVSAYGLCDAANPTNCIAPVNGYFIKTNNTRIVDEWSYTGSSFYAPEPITSLNTKYVAPQVTYQNISTNLPPPLLGNSTGIDFQDELDEFFKNVSTSIPNFGSLTQINTTLLDLTYEMLSLQQVVKALNESYIDLKELGNYTYYNKWPWYIWLGFIAGLVALALCVFFILSFWMCSNGSLQCRICI

SEQ ID NO: 111 - DNA, 4364 bp, Artificial Sequence
  Cloning vector 7147 from left to right T-DNA
tggcaggatatattgtggtgtaaacaaattgacgcttagacaacttaataacacattgcggacgtttttaatgtactgaattaacgccgaatcccgggctggtatatttatatgttgtcaaataactcaaaaaccataaaagtttaagttagcaagtgtgtacatttttacttgaacaaaaatattcacctactactgttataaatcattattaaacattagagtaaagaaatatggatgataagaacaagagtagtgatattttgacaacaattttgttgcaacatttgagaaaattttgttgttctctcttttcattggtcaaaaacaatagagagagaaaaaggaagagggagaataaaaacataatgtgagtatgagagagaaagttgtacaaaagttgtaccaaaatagttgtacaaatatcattgaggaatttgacaaaagctacacaaataagggttaattgctgtaaataaataaggatgacgcattagagagatgtaccattagagaatttttggcaagtcattaaaaagaaagaataaattatttttaaaattaaaagttgagtcatttgattaaacatgtgattatttaatgaattgatgaaagagttggattaaagttgtattagtaattagaatttggtgtcaaatttaatttgacatttgatcttttcctatatattgccccatagagtcagttaactcatttttatatttcatagatcaaataagagaaataacggtatattaatccctccaaaaaaaaaaaacggtatatttactaaaaaatctaagccacgtaggaggataacaggatccccgtaggaggataacatccaatccaaccaatcacaacaatcctgatgagataacccactttaagcccacgcatctgtggcacatctacattatctaaatcacacattcttccacacatctgagccacacaaaaaccaatccacatctttatcacccattctataaaaaatcacactttgtgagtctacactttgattcccttcaaacacatacaaagagaagagactaattaattaattaatcatcttgagagaaaatggaacgagctatacaaggaaacgacgctagggaacaagctaacagtgaacgttgggatggaggatcaggaggtaccacttctcccttcaaacttcctgacgaaagtccgagttggactgagtggcggctacataacgatgagacgaattcgaatcaagataatccccttggtttcaaggaaagctggggtttcgggaaagttgtatttaagagatatctcagatacgacaggacggaagcttcactgcacagagtccttggatcttggacgggagattcggttaactatgcagcatctcgatttttcggtttcgaccagatcggatgtacctatagtattcggtttcgaggagttagtatcaccgtttctggagggtcgcgaactcttcagcatctctgtgagatggcaattcggtctaagcaagaactgctacagcttgccccaatcgaagtggaaagtaatgtatcaagaggatgccctgaaggtactcaaaccttcgaaaaagaaagcgagtaagttaaaatgcttcttcgtctcctatttataatatggtttgttattgttaattttgttcttgtagaagagcttaattaatcgttgttgttatgaaatactatttgtatgagatgaactggtgtaatgtaattcatttacataagtggagtcagaatcagaatgtttcctccataactaactagacatgaagacctgccgcgtacaattgtcttatatttgaacaactaaaattgaacatcttttgccacaactttataagtggttaatatagctcaaatatatggtcaagttcaatagattaataatggaaatatcagttatcgaaattcattaacaatcaacttaacgttattaactactaattttatatcatcccctttgataaatgatagtacaccaattaggaaggagcatgctcgcctaggagattgtcgtttcccgccttcagtttgcaagctgctctagccgtgtagccaatacgcaaaccgcctctccccgcgcgttgggaattactagcgcgtgtcgacaagcttgcatgccggtcaacatggtggagcacgacacacttgtctactccaaaaatatcaaagatacagtctcagaagaccaaagggcaattgagacttttcaacaaagggtaatatccggaaacctcctcggattccattgcccagctatctgtcactttattgtgaagatagtggaaaaggaaggtggctcctacaaatgccatcattgcgataaaggaaaggccatcgttgaagatgcctctgccgacagtggtcccaaagatggacccccacccacgaggagcatcgtggaaaaagaagacgttccaaccacgtcttcaaagcaagtggattgatgtgataacatggtggagcacgacacacttgtctactccaaaaatatcaaagatacagtctcagaagaccaaagggcaattgagacttttcaacaaagggtaatatccggaaacctcctcggattccattgcccagctatctgtcactttattgtgaagatagtggaaaaggaaggtggctcctacaaatgccatcattgcgataaaggaaaggccatcgttgaagatgcctctgccgacagtggtcccaaagatggacccccacccacgaggagcatcgtggaaaaagaagacgttccaaccacgtcttcaaagcaagtggattgatgtgatatctccactgacgtaagggatgacgcacaatcccactatccttcgcaagacccttcctctatataaggaagttcatttcatttggagaggcactccatttgaatctatcaaaccaaaacacattgagacgtcacgtactcctcagccaaaacgacacccccatctgtctatccactggcccctggatctgctgcccaaactaactccatggtgaccctgggatgcctggtcaagggctatttccctgagccagtgacagtgacctggaactctggatccctgtccagcggtgtgcacaccttcccagctgtcctgcagtctgacctctacactctgagcagctcagtgactgtcccctccagcacctggcccagcgagaccgtcacctgcaacgttgcccacccggccagcagcaccaaggtggacaagaaaattgtgcccagggattgtggttgtaagccttgcatatgtacagtcccagaagtatcatctgtcttcatcttccccccaaagcccaaggatgtgctcaccattactctgactcctaaggtcacgtgtgttgtggtagacatcagcaaggatgatcccgaggtccagttcagctggtttgtagatgatgtggaggtgcacacagctcagacgcaaccccgggaggagcagttcaacagcactttccgctcagtcagtgaacttcccatcatgcaccaggactggctcaatggcaaggagacgtccagattttggcgatctattcaactgtcgccagttcattggtactggtagtctccctgggggcaatcagtttctggatgtgctctaatgggtctctacagtgtagaatatgtatttaaaggccttagtcgtgtcgtttttcaaataatataatccttttagggttttagttagtttaaattttctgttgctcctgtttagcaggtcgtgccttcagcaagcacacaaaaacagagtgtttattttaagttgtttgtttagtgattcaaaaaaaaaatcgttcaaacatttggcaataaagtttcttaagattgaatcctgttgccggtcttgcgatgattatcatataatttctgttgaattacgttaagcatgtaataattaacatgtaatgcatgacgttatttatgagatgggtttttatgattagagtcccgcaattatacatttaatacgcgatagaaaacaaaatatagcgcgcaaactaggataaattatcgcgcgcggtgtcatctatgttactagatctctagagtctcaagcttggcgcgcccacgtgactagtggcactggccgtcgttttacaacgtcgtgactgggaaaaccctggcgttacccaacttaatcgccttgcagcacatccccctttcgccagctggcgtaatagcgaagaggcccgcaccgatcgcccttcccaacagttgcgcagcctgaatggcgaatgctagagcagcttgagcttggatcagattgtcgtttcccgccttcagtttaaactatcagtgtttgacaggatatattggcgggtaaacctaagagaaaagagcgttta

SEQ ID NO: 112 - protein, 1255 aa, SARS-CoV-1
MFIFLLFLTLTSGSDLDRCTTFDDVQAPNYTQHTSSMRGVYYPDEIFRSDTLYLTQDLFLPFYSNVTGFHTINHTFGNPVIPFKDGIYFAATEKSNVVRGWVFGSTMNNKSQSVIIINNSTNVVIRACNFELCDNPFFAVSKPMGTQTHTMIFDNAFNCTFEYISDAFSLDVSEKSGNFKHLREFVFKNKDGFLYVYKGYQPIDVVRDLPSGFNTLKPIFKLPLGINITNFRAILTAFSPAQDIWGTSAAAYFVGYLKPTTFMLKYDENGTITDAVDCSQNPLAELKCSVKSFEIDKGIYQTSNFRVVPSGDVVRFPNITNLCPFGEVFNATKFPSVYAWERKKISNCVADYSVLYNSTFFSTFKCYGVSATKLNDLCFSNVYADSFVVKGDDVRQIAPGQTGVIADYNYKLPDDFMGCVLAWNTRNIDATSTGNYNYKYRYLRHGKLRPFERDISNVPFSPDGKPCTPPALNCYWPLNDYGFYTTTGIGYQPYRVVVLSFELLNAPATVCGPKLSTDLIKNQCVNFNFNGLTGTGVLTPSSKRFQPFQQFGRDVSDFTDSVRDPKTSEILDISPCSFGGVSVITPGTNASSEVAVLYQDVNCTDVSTAIHADQLTPAWRIYSTGNNVFQTQAGCLIGAEHVDTSYECDIPIGAGICASYHTVSLLRSTSQKSIVAYTMSLGADSSIAYSNNTIAIPTNFSISITTEVMPVSMAKTSVDCNMYICGDSTECANLLLQYGSFCTQLNRALSGIAAEQDRNTREVFAQVKQMYKTPTLKYFGGFNFSQILPDPLKPTKRSFIEDLLFNKVTLADAGFMKQYGECLGDINARDLICAQKFNGLTVLPPLLTDDMIAAYTAALVSGTATAGWTFGAGAALQIPFAMQMAYRFNGIGVTQNVLYENQKQIANQFNKAISQIQESLTTTSTALGKLQDVVNQNAQALNTLVKQLSSNFGAISSVLNDILSRLDKVEAEVQIDRLITGRLQSLQTYVTQQLIRAAEIRASANLAATKMSECVLGQSKRVDFCGKGYHLMSFPQAAPHGVVFLHVTYVPSQERNFTTAPAICHEGKAYFPREGVFVFNGTSWFITQRNFFSPQIITTDNTFVSGNCDVVIGIINNTVYDPLQPELDSFKEELDKYFKNHTSPDVDLGDISGINASVVNIQKEIDRLNEVAKNLNESLIDLQELGKYEQYIKWPWYVWLGFIAGLIAIVMVTILLCCMTSCCSCLKGACSCGSCCKFDEDDSEPVLKGVKLHYT

SEQ ID NO: 113 - protein, 1353 aa, MERS
MIHSVFLLMFLLTPTESYVDVGPDSVKSACIEVDIQQTFFDKTWPRPIDVSKADGIIYPQGRTYSNITITYQGLFPYQGDHGDMYVYSAGHATGTTPQKLFVANYSQDVKQFANGFVVRIGAAANSTGTVIISPSTSATIRKIYPAFMLGSSVGNFSDGKMGRFFNHTLVLLPDGCGTLLRAFYCILEPRSGNHCPAGNSYTSFATYHTPATDCSDGNYNRNASLNSFKEYFNLRNCTFMYTYNITEDEILEWFGITQTAQGVHLFSSRYVDLYGGNMFQFATLPVYDTIKYYSIIPHSIRSIQSDRKAWAAFYVYKLQPLTFLLDFSVDGYIRRAIDCGFNDLSQLHCSYESFDVESGVYSVSSFEAKPSGSVVEQAEGVECDFSPLLSGTPPQVYNFKRLVFTNCNYNLTKLLSLFSVNDFTCSQISPAAIASNCYSSLILDYFSYPLSMKSDLSVSSAGPISQFNYKQSFSNPTCLILATVPHNLTTITKPLKYSYINKCSRFLSDDRTEVPQLVNANQYSPCVSIVPSTVWEDGDYYRKQLSPLEGGGWLVASGSTVAMTEQLQMGFGITVQYGTDTNSVCPKLEFANDTKIASQLGNCVEYSLYGVSGRGVFQNCTAVGVRQQRFVYDAYQNLVGYYSDDGNYYCLRACVSVPVSVIYDKETKTHATLFGSVACEHISSTMSQYSRSTRSMLKRRDSTYGPLQTPVGCVLGLVNSSLFVEDCKLPLGQSLCALPDTPSTLTPRSVRSVPGEMRLASIAFNHPIQVDQLNSSYFKLSIPTNFSFGVTQEYIQTTIQKVTVDCKQYVCNGFQKCEQLLREYGQFCSKINQALHGANLRQDDSVRNLFASVKSSQSSPIIPGFGGDFNLTLLEPVSISTGSRSARSAIEDLLFDKVTIADPGYMQGYDDCMQQGPASARDLICAQYVAGYKVLPPLMDVNMEAAYTSSLLGSIAGVGWTAGLSSFAAIPFAQSIFYRLNGVGITQQVLSENQKLIANKFNQALGAMQTGFTTTNEAFHKVQDAVNNNAQALSKLASELSNTFGAISASIGDIIQRLDVLEQDAQIDRLINGRLTTLNAFVAQQLVRSESAALSAQLAKDKVNECVKAQSKRSGFCGQGTHIVSFVVNAPNGLYFMHVGYYPSNHIEVVSAYGLCDAANPTNCIAPVNGYFIKTNNTRIVDEWSYTGSSFYAPEPITSLNTKYVAPQVTYQNISTNLPPPLLGNSTGIDFQDELDEFFKNVSTSIPNFGSLTQINTTLLDLTYEMLSLQQVVKALNESYIDLKELGNYTYYNKWPWYIWLGFIAGLVALALCVFFILCCTGCGTNCMGKLKCNRCCDRYEEYDLEPHKVHVH

SEQ ID NO: 114 - protein, 1242 aa, SARS-CoV-1
SDLDRCTTFDDVQAPNYTQHTSSMRGVYYPDEIFRSDTLYLTQDLFLPFYSNVTGFHTINHTFGNPVIPFKDGIYFAATEKSNVVRGWVFGSTMNNKSQSVIIINNSTNVVIRACNFELCDNPFFAVSKPMGTQTHTMIFDNAFNCTFEYISDAFSLDVSEKSGNFKHLREFVFKNKDGFLYVYKGYQPIDVVRDLPSGFNTLKPIFKLPLGINITNFRAILTAFSPAQDIWGTSAAAYFVGYLKPTTFMLKYDENGTITDAVDCSQNPLAELKCSVKSFEIDKGIYQTSNFRVVPSGDVVRFPNITNLCPFGEVFNATKFPSVYAWERKKISNCVADYSVLYNSTFFSTFKCYGVSATKLNDLCFSNVYADSFVVKGDDVRQIAPGQTGVIADYNYKLPDDFMGCVLAWNTRNIDATSTGNYNYKYRYLRHGKLRPFERDISNVPFSPDGKPCTPPALNCYWPLNDYGFYTTTGIGYQPYRVVVLSFELLNAPATVCGPKLSTDLIKNQCVNFNFNGLTGTGVLTPSSKRFQPFQQFGRDVSDFTDSVRDPKTSEILDISPCSFGGVSVITPGTNASSEVAVLYQDVNCTDVSTAIHADQLTPAWRIYSTGNNVFQTQAGCLIGAEHVDTSYECDIPIGAGICASYHTVSLLRSTSQKSIVAYTMSLGADSSIAYSNNTIAIPTNFSISITTEVMPVSMAKTSVDCNMYICGDSTECANLLLQYGSFCTQLNRALSGIAAEQDRNTREVFAQVKQMYKTPTLKYFGGFNFSQILPDPLKPTKRSFIEDLLFNKVTLADAGFMKQYGECLGDINARDLICAQKFNGLTVLPPLLTDDMIAAYTAALVSGTATAGWTFGAGAALQIPFAMQMAYRFNGIGVTQNVLYENQKQIANQFNKAISQIQESLTTTSTALGKLQDVVNQNAQALNTLVKQLSSNFGAISSVLNDILSRLDKVEAEVQIDRLITGRLQSLQTYVTQQLIRAAEIRASANLAATKMSECVLGQSKRVDFCGKGYHLMSFPQAAPHGVVFLHVTYVPSQERNFTTAPAICHEGKAYFPREGVFVFNGTSWFITQRNFFSPQIITTDNTFVSGNCDVVIGIINNTVYDPLQPELDSFKEELDKYFKNHTSPDVDLGDISGINASVVNIQKEIDRLNEVAKNLNESLIDLQELGKYEQYIKWPWYVWLGFIAGLIAIVMVTILLCCMTSCCSCLKGACSCGSCCKFDEDDSEPVLKGVKLHYT

SEQ ID NO: 115 - protein, 1336 aa, MERS
YVDVGPDSVKSACIEVDIQQTFFDKTWPRPIDVSKADGIIYPQGRTYSNITITYQGLFPYQGDHGDMYVYSAGHATGTTPQKLFVANYSQDVKQFANGFVVRIGAAANSTGTVIISPSTSATIRKIYPAFMLGSSVGNFSDGKMGRFFNHTLVLLPDGCGTLLRAFYCILEPRSGNHCPAGNSYTSFATYHTPATDCSDGNYNRNASLNSFKEYFNLRNCTFMYTYNITEDEILEWFGITQTAQGVHLFSSRYVDLYGGNMFQFATLPVYDTIKYYSIIPHSIRSIQSDRKAWAAFYVYKLQPLTFLLDFSVDGYIRRAIDCGFNDLSQLHCSYESFDVESGVYSVSSFEAKPSGSVVEQAEGVECDFSPLLSGTPPQVYNFKRLVFTNCNYNLTKLLSLFSVNDFTCSQISPAAIASNCYSSLILDYFSYPLSMKSDLSVSSAGPISQFNYKQSFSNPTCLILATVPHNLTTITKPLKYSYINKCSRFLSDDRTEVPQLVNANQYSPCVSIVPSTVWEDGDYYRKQLSPLEGGGWLVASGSTVAMTEQLQMGFGITVQYGTDTNSVCPKLEFANDTKIASQLGNCVEYSLYGVSGRGVFQNCTAVGVRQQRFVYDAYQNLVGYYSDDGNYYCLRACVSVPVSVIYDKETKTHATLFGSVACEHISSTMSQYSRSTRSMLKRRDSTYGPLQTPVGCVLGLVNSSLFVEDCKLPLGQSLCALPDTPSTLTPRSVRSVPGEMRLASIAFNHPIQVDQLNSSYFKLSIPTNFSFGVTQEYIQTTIQKVTVDCKQYVCNGFQKCEQLLREYGQFCSKINQALHGANLRQDDSVRNLFASVKSSQSSPIIPGFGGDFNLTLLEPVSISTGSRSARSAIEDLLFDKVTIADPGYMQGYDDCMQQGPASARDLICAQYVAGYKVLPPLMDVNMEAAYTSSLLGSIAGVGWTAGLSSFAAIPFAQSIFYRLNGVGITQQVLSENQKLIANKFNQALGAMQTGFTTTNEAFHKVQDAVNNNAQALSKLASELSNTFGAISASIGDIIQRLDVLEQDAQIDRLINGRLTTLNAFVAQQLVRSESAALSAQLAKDKVNECVKAQSKRSGFCGQGTHIVSFVVNAPNGLYFMHVGYYPSNHIEVVSAYGLCDAANPTNCIAPVNGYFIKTNNTRIVDEWSYTGSSFYAPEPITSLNTKYVAPQVTYQNISTNLPPPLLGNSTGIDFQDELDEFFKNVSTSIPNFGSLTQINTTLLDLTYEMLSLQQVVKALNESYIDLKELGNYTYYNKWPWYIWLGFIAGLVALALCVFFILCCTGCGTNCMGKLKCNRCCDRYEEYDLEPHKVHVH

SEQ ID NO: 116 - protein, 60 aa, Artificial Sequence
  TMCT region of modified PDI-SARS-COV-1 wtTMCT-AA
WYVWLGFIAGLIAIVMVTILLCCMTSCCSCLKGACSCGSCCKFDEDDSEPVLKGVKLHYT

SEQ ID NO: 117 - protein, 40 aa, Artificial Sequence
  YQILSIYSTVASSLALAIMMAGLSLWMCSNGSLQCRICI
WYQILSIYSTVASSLALAIMMAGLSLWMCSNGSLQCRICI

SEQ ID NO: 118 - protein, 37 aa, Artificial Sequence
  TMCT region of modified PDI-SARS-COV-1 H5iCT-AA
WYVWLGFIAGLIAIVMVTILLSLWMCSNGSLQCRICI

SEQ ID NO: 119 - protein, 34 aa, Artificial Sequence
  TMCT region of modified PDI-SARS-COV-1 H5iCT(V4)-AA
WYVWLGFIAGLIAIVMVTILLCCSNGSLQCRICI

SEQ ID NO: 120 - protein, 37 aa, Artificial Sequence
  TMCT region of modified PDI-SARS-COV-1 H1cCT-AA
WYVWLGFIAGLIAIVMVTILLSFWMCSNGSLQCRICI

SEQ ID NO: 121 - protein, 57 aa, Artificial Sequence
  TMCT region of modified PDI-MERS-wtTMCT-AA
WYIWLGFIAGLVALALCVFFILCCTGCGTNCMGKLKCNRCCDRYEEYDLEPHKVHVH

SEQ ID NO: 122 - protein, 40 aa, Artificial Sequence; identical to SEQ ID NO: 117
  TMCT region of modified PDI-MERS-H5iTMCT-AA

SEQ ID NO: 123 - protein, 38 aa, Artificial Sequence
  TMCT region of modified PDI-MERS-H5iCT-AA
WYIWLGFIAGLVALALCVFFILSLWMCSNGSLQCRICI

SEQ ID NO: 124 - protein, 35 aa, Artificial Sequence
  TMCT region of modified PDI-MERS-H5iCT(V4)-AA
WYIWLGFIAGLVALALCVFFILCCSNGSLQCRICI

SEQ ID NO: 125 - protein, 38 aa, Artificial Sequence
  TMCT region of modified PDI-MERS-H1cCT-AA
WYIWLGFIAGLVALALCVFFILSFWMCSNGSLQCRICI

SEQ ID NO: 126 - protein, 37 aa, Artificial Sequence
  TMCT region of modified PDI-S-protein+H1 Cal
WYIWLGFIAGLIAIVMVTIMLSFWMCSNGSLQCRICI

SEQ ID NO: 127 - protein, 36 aa, Artificial Sequence
  TMCT region of modified PDI-S-protein+H3 Minn
WYIWLGFIAGLIAIVMVTIMLMWACQKGNIRCNICI

SEQ ID NO: 128 - protein, 37 aa, Artificial Sequence
  TMCT region of modified PDI-S-protein+H6 HK
WYIWLGFIAGLIAIVMVTIMLGLWMCSNGSMQCRICI

SEQ ID NO: 129 - protein, 37 aa, Artificial Sequence
  TMCT region of modified PDI-S-protein+H7 Guangdong
WYIWLGFIAGLIAIVMVTIMLVFICVKNGNMRCTICI

SEQ ID NO: 130 - protein, 37 aa, Artificial Sequence
  TMCT region of modified PDI-S-protein+H9 HK
WYIWLGFIAGLIAIVMVTIMLLFWAMSNGSCRCNICI

SEQ ID NO: 131 - protein, 37 aa, Artificial Sequence
  TMCT region of modified PDI-S-protein+ B/ Wash
WYIWLGFIAGLIAIVMVTIMLVVYMVSRDNVSCSICL

SEQ ID NO: 132 - protein, 22 aa, Artificial Sequence
  Consensus Sequence of TM Domain of Coronavirus S-protein
  misc_feature (3)..(3): Xaa can be any naturally occurring amino acid
  misc_feature (12)..(12): Xaa can be any naturally occurring amino acid
  misc_feature (14)..(16): Xaa can be any naturally occurring amino acid
  MISC_FEATURE (17)..(17): Xaa may be present or absent
  misc_feature (19)..(21): Xaa can be any naturally occurring amino acid
WYXWLGFIAGLXAXXXXVXXXL

SEQ ID NO: 133 - protein, 22 aa, Artificial Sequence
  Consensus Sequence of TM Domain of Coronavirus S-protein
  MISC_FEATURE (3)..(3): Xaa may be Ile or Val
  MISC_FEATURE (12)..(12): Xaa  may be Val or Ile
  MISC_FEATURE (14)..(14): Xaa may be Leu or Ile
  MISC_FEATURE (15)..(15): Xaa may be Ala or Val
  MISC_FEATURE (16)..(16): Xaa may be Leu or Met
  MISC_FEATURE (17)..(17): Xaa may be Cys or absent
  MISC_FEATURE (19)..(19): Xaa may be Phe or Thr
  MISC_FEATURE (20)..(20): Xaa may be Phe or Ile
  misc_feature (21)..(21): Xaa can be any naturally occurring amino acid
WYXWLGFIAGLXAXXXXVXXXL

SEQ ID NO: 134 - protein, 42 aa, Artificial Sequence
  TM/CT Region of Modified SARS-CoV-1 S protein with intervening peptide sequence
  MISC_FEATURE (21)..(30): Xaa may be absent or present
  misc_feature (36)..(37): Xaa can be any naturally occurring amino acid
  misc_feature (39)..(39): Xaa can be any naturally occurring amino acid
WYVWLGFIAGLIAIVMVTILXXXXXXXXXXCSNGSXXCXICI

SEQ ID NO: 135 - protein, 44 aa, Artificial Sequence
  TM/CT Region of Modified MERS S protein with intervening peptide sequence
  MISC_FEATURE (23)..(32): Xaa may be present or absent
  misc_feature (38)..(39): Xaa can be any naturally occurring amino acid
  misc_feature (41)..(41): Xaa can be any naturally occurring amino acid
WYIWLGFIAGLVALALCVFFILXXXXXXXXXXCSNGSXXCXICI

SEQ ID NO: 136 - DNA, 49 bp, Artificial Sequence
  IF(AvB+wtCT-OC43).r
acgacacgactaaggccttcagtcgtcatgcgaggtcttaatgacaagc

SEQ ID NO: 137 - DNA, 4113 bp, Artificial Sequence
  PDI-OC43-wtTMCT-DNA
atggcgaaaaacgttgcgattttcggcttattgttttctcttcttgtgttggttccttctcagatcttcgcggtgatcggcgatctgaattgtaccctggatccccgcctgaaagggagctttaacaaccgagatacaggacccccgtctatatccatagatacagtggatgttacgaacgggctcggcacctactatgtgctagaccgagtttatttgaacaccaccttattcctcaatggatactacccaacttcaggtagtacttacagaaacatggcgctgaagggtacggatctgctgagcaccctatggtttaaacctcccttcctctcggactttattaatggcatcttcgctaaggtgaaaaacacgaaggttttcaaagatggagtgatgtattcagagttccctgcgatcaccattggaagtaccttcgtgaatacttcctatagcgtggtggttcaaccacggacaatcaactccacccaggacggcgtcaacaagctccagggattgctggaggtgtcagtctgtcaatataacatgtgtgagtacccacacactatctgtcaccctaatctaggcaaccactttaaggaactgtggcactacgatacgggggtggtaagttgcttatataagagaaatttcacctatgatgttaatgcaacgtacctgtactttcacttctatcaagaaggaggaactttctacgcatatttcacagataccggctttgtgacgaaattcttattcaacgtttacctcggaatggcattaagccattattacgtgatgcctctcacttgcatcagacgccctaaggatggtttttctctggagtactgggtcactcccctgacaccacggcagtacctgcttgcttttaaccaggacggtatcatttttaatgccgtcgattgtatgagcgattttatgagcgagataaagtgcaagacccaatctattgctccgcccacgggggtgtacgaactgaatggttacaccgtccagcccgttgccgatgtatatagacggaaaccagacctgcccaattgcaacatcgaagcttggttaaacgataagtcagtgccctcccccctcaattgggagaggaagactttctccaactgtaatttcaacatgtcaagcctgatgtctttcattcaagccgattcgttcacttgtaataatatagatgcagcaaagatctatggtatgtgcttcagttccatcacaatagataagtttgcaataccaaaccgtcgcaaggtggaccttcagctcggcaacctgggctatctgcagtccagcaattatagaatagacaccaccgccacatcatgtcagctgtactataacctcccagcagcgaacgtcagtgttagtaggttcaatccttctacctggaataaaaggtttggattcatcgaagatagtgtgttcgtacctcagccaacaggagtgttcaccaatcacagcgtggtctacgcccaacattgcttcaaggcacccaaaaatttctgcccatgtagcagttgctcctgcccgggtaagaacaatgggatcggcacctgcccagcaggcaccaattcacttacatgcgataatctgtgtacactggatcctattacacttaaggcccctgatacctacaaatgcccccagagcaagagcctggtcggtatcggagaacactgttccggacttgcagtaaaaagcgactattgtggaaataactcttgcacttgtcagccacaagccttcctcggttggtccgctgactcttgtttacaaggggataagtgtaacatcttcgcaaatttcatcttacacgatgtgaataacggcttaacatgcagcacagatctccagaaggcaaacacagagatcgaattaggagtctgcgttaattacgatctctacgggatctctggccagggcatcttcgtggaggttaatgctacctactacaatagttggcaaaatctgctctacgatagcaatggcaacctctatggattcagagactatattactaacaggacgttcatgattcactcgtgctattccgggcgggtgtcagcagcttatcacgcaaattcttcagagccagctctgctattccgaaacataaaatgtaattacgtgttcaataattcactgactcggcagctgcagccgattaattacagcttcgacagctaccttggttgcgttgttaacgcctacaactccactgccatatcagttcagacctgcgaccttactgtgggctctggctattgtgtcgattattcaaagaacggggggagcgggtccgcaataacaactggctataggttcaccaattttgagcctttcaccgtgaatagtgtcaacgatagcctggagcctgtcggaggtctttatgagatacaaatcccctccgagttcacaattggcaacatggaagagttcatccagacgagttccccaaaggtgacgatcgattgcgcggctttcgtctgcggcgactacgccgcatgcaagttacaactcgttgagtatggaagtttttgcgataatataaacgcaattctgactgaagtgaacgaactgctggacaccactcagttgcaggtggcaaattcgctcatgaacggcgtgacactgtcaaccaaactgaaggacggtgtcaatttcaatgtggatgacattaacttcagccccgtactgggctgtttgggtagtgagtgttctaaggctagcagccgctccgccattgaggacttgttgtttgataaagttaagctgagtgacgttggatttgttgaggcgtataataactgtaccggtggtgcagagataagggatctgatctgtgtccagagttataaggggattaaggttctccccccgctactctcggagaatcagatatcaggatacaccctggccgctacctcagcctcgctgtttcccccttggaccgctgccgccggtgtcccattttatttgaatgtgcagtatcggatcaacggtctgggagtgacaatggacgtgctgtctcagaaccagaaactgatcgccaatgcattcaacaatgctctgcacgccatccagcaagggtttgacgctacaaattctgccctcgtaaaaatccaggccgtggtgaatgctaacgccgaagcccttaataatctgctccagcagctttctaaccgctttggagctatttctgcctcactgcaggaaattctatccagactggatccccctgaggcagaagcccaaatcgaccgtctcataaacggcagactcactgctcttaacgcctacgttagtcaacaattgagcgattcgaccttggtgaaattcagcgcagctcaggctatggagaaggtgaacgagtgcgtgaagtcacagagctccagaatcaatttctgtggcaatgggaaccatatcatctccttggttcagaatgctccctacggcctgtatttcatccacttcaactacgtgcccacgaagtacgttacagccaaagtgtcccccggactgtgcatcgctggtaacaggggcattgcaccaaaatccggctacttcgtcaatgtcaacaacacatggatgtatactgggagtggttattattaccctgaacctataacagagaacaatgtagtagtcatgtccacatgcgccgtcaattatactaaggccccctatgttatgctcaacacttcaattcccaatctcccggatttcaaagaagagctggatcagtggtttaagaatcagacatccgtggcccctgacttaagcttggattatatcaatgtgacttttttagacttacaggtcgagatgaaccgactccaggaagctataaaagtactgaaccactcctatatcaatctgaaagatatcggtacatacgaatattacgtaaaatggccttggtatgtgtggctactaatttgccttgcgggcgtggctatgctggtcctgctgttcttcatttgctgctgtactgggtgcggtacttcctgcttcaaaaagtgcggtggttgctgcgacgactacactgggtaccaggagcttgtcattaagacctcgcatgacgactga

SEQ ID NO: 138 - DNA, 4065 bp, Artificial  Sequence
  PDI-OC43-H5iTMCT-DNA
atggcgaaaaacgttgcgattttcggcttattgttttctcttcttgtgttggttccttctcagatcttcgcggtgatcggcgatctgaattgtaccctggatccccgcctgaaagggagctttaacaaccgagatacaggacccccgtctatatccatagatacagtggatgttacgaacgggctcggcacctactatgtgctagaccgagtttatttgaacaccaccttattcctcaatggatactacccaacttcaggtagtacttacagaaacatggcgctgaagggtacggatctgctgagcaccctatggtttaaacctcccttcctctcggactttattaatggcatcttcgctaaggtgaaaaacacgaaggttttcaaagatggagtgatgtattcagagttccctgcgatcaccattggaagtaccttcgtgaatacttcctatagcgtggtggttcaaccacggacaatcaactccacccaggacggcgtcaacaagctccagggattgctggaggtgtcagtctgtcaatataacatgtgtgagtacccacacactatctgtcaccctaatctaggcaaccactttaaggaactgtggcactacgatacgggggtggtaagttgcttatataagagaaatttcacctatgatgttaatgcaacgtacctgtactttcacttctatcaagaaggaggaactttctacgcatatttcacagataccggctttgtgacgaaattcttattcaacgtttacctcggaatggcattaagccattattacgtgatgcctctcacttgcatcagacgccctaaggatggtttttctctggagtactgggtcactcccctgacaccacggcagtacctgcttgcttttaaccaggacggtatcatttttaatgccgtcgattgtatgagcgattttatgagcgagataaagtgcaagacccaatctattgctccgcccacgggggtgtacgaactgaatggttacaccgtccagcccgttgccgatgtatatagacggaaaccagacctgcccaattgcaacatcgaagcttggttaaacgataagtcagtgccctcccccctcaattgggagaggaagactttctccaactgtaatttcaacatgtcaagcctgatgtctttcattcaagccgattcgttcacttgtaataatatagatgcagcaaagatctatggtatgtgcttcagttccatcacaatagataagtttgcaataccaaaccgtcgcaaggtggaccttcagctcggcaacctgggctatctgcagtccagcaattatagaatagacaccaccgccacatcatgtcagctgtactataacctcccagcagcgaacgtcagtgttagtaggttcaatccttctacctggaataaaaggtttggattcatcgaagatagtgtgttcgtacctcagccaacaggagtgttcaccaatcacagcgtggtctacgcccaacattgcttcaaggcacccaaaaatttctgcccatgtagcagttgctcctgcccgggtaagaacaatgggatcggcacctgcccagcaggcaccaattcacttacatgcgataatctgtgtacactggatcctattacacttaaggcccctgatacctacaaatgcccccagagcaagagcctggtcggtatcggagaacactgttccggacttgcagtaaaaagcgactattgtggaaataactcttgcacttgtcagccacaagccttcctcggttggtccgctgactcttgtttacaaggggataagtgtaacatcttcgcaaatttcatcttacacgatgtgaataacggcttaacatgcagcacagatctccagaaggcaaacacagagatcgaattaggagtctgcgttaattacgatctctacgggatctctggccagggcatcttcgtggaggttaatgctacctactacaatagttggcaaaatctgctctacgatagcaatggcaacctctatggattcagagactatattactaacaggacgttcatgattcactcgtgctattccgggcgggtgtcagcagcttatcacgcaaattcttcagagccagctctgctattccgaaacataaaatgtaattacgtgttcaataattcactgactcggcagctgcagccgattaattacagcttcgacagctaccttggttgcgttgttaacgcctacaactccactgccatatcagttcagacctgcgaccttactgtgggctctggctattgtgtcgattattcaaagaacggggggagcgggtccgcaataacaactggctataggttcaccaattttgagcctttcaccgtgaatagtgtcaacgatagcctggagcctgtcggaggtctttatgagatacaaatcccctccgagttcacaattggcaacatggaagagttcatccagacgagttccccaaaggtgacgatcgattgcgcggctttcgtctgcggcgactacgccgcatgcaagttacaactcgttgagtatggaagtttttgcgataatataaacgcaattctgactgaagtgaacgaactgctggacaccactcagttgcaggtggcaaattcgctcatgaacggcgtgacactgtcaaccaaactgaaggacggtgtcaatttcaatgtggatgacattaacttcagccccgtactgggctgtttgggtagtgagtgttctaaggctagcagccgctccgccattgaggacttgttgtttgataaagttaagctgagtgacgttggatttgttgaggcgtataataactgtaccggtggtgcagagataagggatctgatctgtgtccagagttataaggggattaaggttctccccccgctactctcggagaatcagatatcaggatacaccctggccgctacctcagcctcgctgtttcccccttggaccgctgccgccggtgtcccattttatttgaatgtgcagtatcggatcaacggtctgggagtgacaatggacgtgctgtctcagaaccagaaactgatcgccaatgcattcaacaatgctctgcacgccatccagcaagggtttgacgctacaaattctgccctcgtaaaaatccaggccgtggtgaatgctaacgccgaagcccttaataatctgctccagcagctttctaaccgctttggagctatttctgcctcactgcaggaaattctatccagactggatccccctgaggcagaagcccaaatcgaccgtctcataaacggcagactcactgctcttaacgcctacgttagtcaacaattgagcgattcgaccttggtgaaattcagcgcagctcaggctatggagaaggtgaacgagtgcgtgaagtcacagagctccagaatcaatttctgtggcaatgggaaccatatcatctccttggttcagaatgctccctacggcctgtatttcatccacttcaactacgtgcccacgaagtacgttacagccaaagtgtcccccggactgtgcatcgctggtaacaggggcattgcaccaaaatccggctacttcgtcaatgtcaacaacacatggatgtatactgggagtggttattattaccctgaacctataacagagaacaatgtagtagtcatgtccacatgcgccgtcaattatactaaggccccctatgttatgctcaacacttcaattcccaatctcccggatttcaaagaagagctggatcagtggtttaagaatcagacatccgtggcccctgacttaagcttggattatatcaatgtgacttttttagacttacaggtcgagatgaaccgactccaggaagctataaaagtactgaaccactcctatatcaatctgaaagatatcggtacatacgaatattacgtaaaatggccttggtatcaaatactgtcaatttattcaacagtggcgagttccctagcactggcaatcatgatggctggtctatctttatggatgtgctccaatggatcgttacaatgcagaatttgcatttga

SEQ ID NO: 139 - DNA, 4056 bp, Artificial Sequence
  PDI-OC43-H5iCT-DNA
atggcgaaaaacgttgcgattttcggcttattgttttctcttcttgtgttggttccttctcagatcttcgcggtgatcggcgatctgaattgtaccctggatccccgcctgaaagggagctttaacaaccgagatacaggacccccgtctatatccatagatacagtggatgttacgaacgggctcggcacctactatgtgctagaccgagtttatttgaacaccaccttattcctcaatggatactacccaacttcaggtagtacttacagaaacatggcgctgaagggtacggatctgctgagcaccctatggtttaaacctcccttcctctcggactttattaatggcatcttcgctaaggtgaaaaacacgaaggttttcaaagatggagtgatgtattcagagttccctgcgatcaccattggaagtaccttcgtgaatacttcctatagcgtggtggttcaaccacggacaatcaactccacccaggacggcgtcaacaagctccagggattgctggaggtgtcagtctgtcaatataacatgtgtgagtacccacacactatctgtcaccctaatctaggcaaccactttaaggaactgtggcactacgatacgggggtggtaagttgcttatataagagaaatttcacctatgatgttaatgcaacgtacctgtactttcacttctatcaagaaggaggaactttctacgcatatttcacagataccggctttgtgacgaaattcttattcaacgtttacctcggaatggcattaagccattattacgtgatgcctctcacttgcatcagacgccctaaggatggtttttctctggagtactgggtcactcccctgacaccacggcagtacctgcttgcttttaaccaggacggtatcatttttaatgccgtcgattgtatgagcgattttatgagcgagataaagtgcaagacccaatctattgctccgcccacgggggtgtacgaactgaatggttacaccgtccagcccgttgccgatgtatatagacggaaaccagacctgcccaattgcaacatcgaagcttggttaaacgataagtcagtgccctcccccctcaattgggagaggaagactttctccaactgtaatttcaacatgtcaagcctgatgtctttcattcaagccgattcgttcacttgtaataatatagatgcagcaaagatctatggtatgtgcttcagttccatcacaatagataagtttgcaataccaaaccgtcgcaaggtggaccttcagctcggcaacctgggctatctgcagtccagcaattatagaatagacaccaccgccacatcatgtcagctgtactataacctcccagcagcgaacgtcagtgttagtaggttcaatccttctacctggaataaaaggtttggattcatcgaagatagtgtgttcgtacctcagccaacaggagtgttcaccaatcacagcgtggtctacgcccaacattgcttcaaggcacccaaaaatttctgcccatgtagcagttgctcctgcccgggtaagaacaatgggatcggcacctgcccagcaggcaccaattcacttacatgcgataatctgtgtacactggatcctattacacttaaggcccctgatacctacaaatgcccccagagcaagagcctggtcggtatcggagaacactgttccggacttgcagtaaaaagcgactattgtggaaataactcttgcacttgtcagccacaagccttcctcggttggtccgctgactcttgtttacaaggggataagtgtaacatcttcgcaaatttcatcttacacgatgtgaataacggcttaacatgcagcacagatctccagaaggcaaacacagagatcgaattaggagtctgcgttaattacgatctctacgggatctctggccagggcatcttcgtggaggttaatgctacctactacaatagttggcaaaatctgctctacgatagcaatggcaacctctatggattcagagactatattactaacaggacgttcatgattcactcgtgctattccgggcgggtgtcagcagcttatcacgcaaattcttcagagccagctctgctattccgaaacataaaatgtaattacgtgttcaataattcactgactcggcagctgcagccgattaattacagcttcgacagctaccttggttgcgttgttaacgcctacaactccactgccatatcagttcagacctgcgaccttactgtgggctctggctattgtgtcgattattcaaagaacggggggagcgggtccgcaataacaactggctataggttcaccaattttgagcctttcaccgtgaatagtgtcaacgatagcctggagcctgtcggaggtctttatgagatacaaatcccctccgagttcacaattggcaacatggaagagttcatccagacgagttccccaaaggtgacgatcgattgcgcggctttcgtctgcggcgactacgccgcatgcaagttacaactcgttgagtatggaagtttttgcgataatataaacgcaattctgactgaagtgaacgaactgctggacaccactcagttgcaggtggcaaattcgctcatgaacggcgtgacactgtcaaccaaactgaaggacggtgtcaatttcaatgtggatgacattaacttcagccccgtactgggctgtttgggtagtgagtgttctaaggctagcagccgctccgccattgaggacttgttgtttgataaagttaagctgagtgacgttggatttgttgaggcgtataataactgtaccggtggtgcagagataagggatctgatctgtgtccagagttataaggggattaaggttctccccccgctactctcggagaatcagatatcaggatacaccctggccgctacctcagcctcgctgtttcccccttggaccgctgccgccggtgtcccattttatttgaatgtgcagtatcggatcaacggtctgggagtgacaatggacgtgctgtctcagaaccagaaactgatcgccaatgcattcaacaatgctctgcacgccatccagcaagggtttgacgctacaaattctgccctcgtaaaaatccaggccgtggtgaatgctaacgccgaagcccttaataatctgctccagcagctttctaaccgctttggagctatttctgcctcactgcaggaaattctatccagactggatccccctgaggcagaagcccaaatcgaccgtctcataaacggcagactcactgctcttaacgcctacgttagtcaacaattgagcgattcgaccttggtgaaattcagcgcagctcaggctatggagaaggtgaacgagtgcgtgaagtcacagagctccagaatcaatttctgtggcaatgggaaccatatcatctccttggttcagaatgctccctacggcctgtatttcatccacttcaactacgtgcccacgaagtacgttacagccaaagtgtcccccggactgtgcatcgctggtaacaggggcattgcaccaaaatccggctacttcgtcaatgtcaacaacacatggatgtatactgggagtggttattattaccctgaacctataacagagaacaatgtagtagtcatgtccacatgcgccgtcaattatactaaggccccctatgttatgctcaacacttcaattcccaatctcccggatttcaaagaagagctggatcagtggtttaagaatcagacatccgtggcccctgacttaagcttggattatatcaatgtgacttttttagacttacaggtcgagatgaaccgactccaggaagctataaaagtactgaaccactcctatatcaatctgaaagatatcggtacatacgaatattacgtaaaatggccttggtatgtgtggctactaatttgccttgcgggcgtggctatgctggtcctgctgttcttcatttctttatggatgtgctccaatggatcgttacaatgcagaatttgcatttga

SEQ ID NO: 140 - DNA, 4047 bp, Artificial Sequence
  PDI-OC43-H5iCT(V4)-DNA
atggcgaaaaacgttgcgattttcggcttattgttttctcttcttgtgttggttccttctcagatcttcgcggtgatcggcgatctgaattgtaccctggatccccgcctgaaagggagctttaacaaccgagatacaggacccccgtctatatccatagatacagtggatgttacgaacgggctcggcacctactatgtgctagaccgagtttatttgaacaccaccttattcctcaatggatactacccaacttcaggtagtacttacagaaacatggcgctgaagggtacggatctgctgagcaccctatggtttaaacctcccttcctctcggactttattaatggcatcttcgctaaggtgaaaaacacgaaggttttcaaagatggagtgatgtattcagagttccctgcgatcaccattggaagtaccttcgtgaatacttcctatagcgtggtggttcaaccacggacaatcaactccacccaggacggcgtcaacaagctccagggattgctggaggtgtcagtctgtcaatataacatgtgtgagtacccacacactatctgtcaccctaatctaggcaaccactttaaggaactgtggcactacgatacgggggtggtaagttgcttatataagagaaatttcacctatgatgttaatgcaacgtacctgtactttcacttctatcaagaaggaggaactttctacgcatatttcacagataccggctttgtgacgaaattcttattcaacgtttacctcggaatggcattaagccattattacgtgatgcctctcacttgcatcagacgccctaaggatggtttttctctggagtactgggtcactcccctgacaccacggcagtacctgcttgcttttaaccaggacggtatcatttttaatgccgtcgattgtatgagcgattttatgagcgagataaagtgcaagacccaatctattgctccgcccacgggggtgtacgaactgaatggttacaccgtccagcccgttgccgatgtatatagacggaaaccagacctgcccaattgcaacatcgaagcttggttaaacgataagtcagtgccctcccccctcaattgggagaggaagactttctccaactgtaatttcaacatgtcaagcctgatgtctttcattcaagccgattcgttcacttgtaataatatagatgcagcaaagatctatggtatgtgcttcagttccatcacaatagataagtttgcaataccaaaccgtcgcaaggtggaccttcagctcggcaacctgggctatctgcagtccagcaattatagaatagacaccaccgccacatcatgtcagctgtactataacctcccagcagcgaacgtcagtgttagtaggttcaatccttctacctggaataaaaggtttggattcatcgaagatagtgtgttcgtacctcagccaacaggagtgttcaccaatcacagcgtggtctacgcccaacattgcttcaaggcacccaaaaatttctgcccatgtagcagttgctcctgcccgggtaagaacaatgggatcggcacctgcccagcaggcaccaattcacttacatgcgataatctgtgtacactggatcctattacacttaaggcccctgatacctacaaatgcccccagagcaagagcctggtcggtatcggagaacactgttccggacttgcagtaaaaagcgactattgtggaaataactcttgcacttgtcagccacaagccttcctcggttggtccgctgactcttgtttacaaggggataagtgtaacatcttcgcaaatttcatcttacacgatgtgaataacggcttaacatgcagcacagatctccagaaggcaaacacagagatcgaattaggagtctgcgttaattacgatctctacgggatctctggccagggcatcttcgtggaggttaatgctacctactacaatagttggcaaaatctgctctacgatagcaatggcaacctctatggattcagagactatattactaacaggacgttcatgattcactcgtgctattccgggcgggtgtcagcagcttatcacgcaaattcttcagagccagctctgctattccgaaacataaaatgtaattacgtgttcaataattcactgactcggcagctgcagccgattaattacagcttcgacagctaccttggttgcgttgttaacgcctacaactccactgccatatcagttcagacctgcgaccttactgtgggctctggctattgtgtcgattattcaaagaacggggggagcgggtccgcaataacaactggctataggttcaccaattttgagcctttcaccgtgaatagtgtcaacgatagcctggagcctgtcggaggtctttatgagatacaaatcccctccgagttcacaattggcaacatggaagagttcatccagacgagttccccaaaggtgacgatcgattgcgcggctttcgtctgcggcgactacgccgcatgcaagttacaactcgttgagtatggaagtttttgcgataatataaacgcaattctgactgaagtgaacgaactgctggacaccactcagttgcaggtggcaaattcgctcatgaacggcgtgacactgtcaaccaaactgaaggacggtgtcaatttcaatgtggatgacattaacttcagccccgtactgggctgtttgggtagtgagtgttctaaggctagcagccgctccgccattgaggacttgttgtttgataaagttaagctgagtgacgttggatttgttgaggcgtataataactgtaccggtggtgcagagataagggatctgatctgtgtccagagttataaggggattaaggttctccccccgctactctcggagaatcagatatcaggatacaccctggccgctacctcagcctcgctgtttcccccttggaccgctgccgccggtgtcccattttatttgaatgtgcagtatcggatcaacggtctgggagtgacaatggacgtgctgtctcagaaccagaaactgatcgccaatgcattcaacaatgctctgcacgccatccagcaagggtttgacgctacaaattctgccctcgtaaaaatccaggccgtggtgaatgctaacgccgaagcccttaataatctgctccagcagctttctaaccgctttggagctatttctgcctcactgcaggaaattctatccagactggatccccctgaggcagaagcccaaatcgaccgtctcataaacggcagactcactgctcttaacgcctacgttagtcaacaattgagcgattcgaccttggtgaaattcagcgcagctcaggctatggagaaggtgaacgagtgcgtgaagtcacagagctccagaatcaatttctgtggcaatgggaaccatatcatctccttggttcagaatgctccctacggcctgtatttcatccacttcaactacgtgcccacgaagtacgttacagccaaagtgtcccccggactgtgcatcgctggtaacaggggcattgcaccaaaatccggctacttcgtcaatgtcaacaacacatggatgtatactgggagtggttattattaccctgaacctataacagagaacaatgtagtagtcatgtccacatgcgccgtcaattatactaaggccccctatgttatgctcaacacttcaattcccaatctcccggatttcaaagaagagctggatcagtggtttaagaatcagacatccgtggcccctgacttaagcttggattatatcaatgtgacttttttagacttacaggtcgagatgaaccgactccaggaagctataaaagtactgaaccactcctatatcaatctgaaagatatcggtacatacgaatattacgtaaaatggccttggtatgtgtggctactaatttgccttgcgggcgtggctatgctggtcctgctgttcttcatttgctgctccaatggatcgttacaatgcagaatttgcatttga

SEQ ID NO: 141 - DNA, 4056 bp, Artificial Sequence
  PDI-OC43-H1cCT-DNA
atggcgaaaaacgttgcgattttcggcttattgttttctcttcttgtgttggttccttctcagatcttcgcggtgatcggcgatctgaattgtaccctggatccccgcctgaaagggagctttaacaaccgagatacaggacccccgtctatatccatagatacagtggatgttacgaacgggctcggcacctactatgtgctagaccgagtttatttgaacaccaccttattcctcaatggatactacccaacttcaggtagtacttacagaaacatggcgctgaagggtacggatctgctgagcaccctatggtttaaacctcccttcctctcggactttattaatggcatcttcgctaaggtgaaaaacacgaaggttttcaaagatggagtgatgtattcagagttccctgcgatcaccattggaagtaccttcgtgaatacttcctatagcgtggtggttcaaccacggacaatcaactccacccaggacggcgtcaacaagctccagggattgctggaggtgtcagtctgtcaatataacatgtgtgagtacccacacactatctgtcaccctaatctaggcaaccactttaaggaactgtggcactacgatacgggggtggtaagttgcttatataagagaaatttcacctatgatgttaatgcaacgtacctgtactttcacttctatcaagaaggaggaactttctacgcatatttcacagataccggctttgtgacgaaattcttattcaacgtttacctcggaatggcattaagccattattacgtgatgcctctcacttgcatcagacgccctaaggatggtttttctctggagtactgggtcactcccctgacaccacggcagtacctgcttgcttttaaccaggacggtatcatttttaatgccgtcgattgtatgagcgattttatgagcgagataaagtgcaagacccaatctattgctccgcccacgggggtgtacgaactgaatggttacaccgtccagcccgttgccgatgtatatagacggaaaccagacctgcccaattgcaacatcgaagcttggttaaacgataagtcagtgccctcccccctcaattgggagaggaagactttctccaactgtaatttcaacatgtcaagcctgatgtctttcattcaagccgattcgttcacttgtaataatatagatgcagcaaagatctatggtatgtgcttcagttccatcacaatagataagtttgcaataccaaaccgtcgcaaggtggaccttcagctcggcaacctgggctatctgcagtccagcaattatagaatagacaccaccgccacatcatgtcagctgtactataacctcccagcagcgaacgtcagtgttagtaggttcaatccttctacctggaataaaaggtttggattcatcgaagatagtgtgttcgtacctcagccaacaggagtgttcaccaatcacagcgtggtctacgcccaacattgcttcaaggcacccaaaaatttctgcccatgtagcagttgctcctgcccgggtaagaacaatgggatcggcacctgcccagcaggcaccaattcacttacatgcgataatctgtgtacactggatcctattacacttaaggcccctgatacctacaaatgcccccagagcaagagcctggtcggtatcggagaacactgttccggacttgcagtaaaaagcgactattgtggaaataactcttgcacttgtcagccacaagccttcctcggttggtccgctgactcttgtttacaaggggataagtgtaacatcttcgcaaatttcatcttacacgatgtgaataacggcttaacatgcagcacagatctccagaaggcaaacacagagatcgaattaggagtctgcgttaattacgatctctacgggatctctggccagggcatcttcgtggaggttaatgctacctactacaatagttggcaaaatctgctctacgatagcaatggcaacctctatggattcagagactatattactaacaggacgttcatgattcactcgtgctattccgggcgggtgtcagcagcttatcacgcaaattcttcagagccagctctgctattccgaaacataaaatgtaattacgtgttcaataattcactgactcggcagctgcagccgattaattacagcttcgacagctaccttggttgcgttgttaacgcctacaactccactgccatatcagttcagacctgcgaccttactgtgggctctggctattgtgtcgattattcaaagaacggggggagcgggtccgcaataacaactggctataggttcaccaattttgagcctttcaccgtgaatagtgtcaacgatagcctggagcctgtcggaggtctttatgagatacaaatcccctccgagttcacaattggcaacatggaagagttcatccagacgagttccccaaaggtgacgatcgattgcgcggctttcgtctgcggcgactacgccgcatgcaagttacaactcgttgagtatggaagtttttgcgataatataaacgcaattctgactgaagtgaacgaactgctggacaccactcagttgcaggtggcaaattcgctcatgaacggcgtgacactgtcaaccaaactgaaggacggtgtcaatttcaatgtggatgacattaacttcagccccgtactgggctgtttgggtagtgagtgttctaaggctagcagccgctccgccattgaggacttgttgtttgataaagttaagctgagtgacgttggatttgttgaggcgtataataactgtaccggtggtgcagagataagggatctgatctgtgtccagagttataaggggattaaggttctccccccgctactctcggagaatcagatatcaggatacaccctggccgctacctcagcctcgctgtttcccccttggaccgctgccgccggtgtcccattttatttgaatgtgcagtatcggatcaacggtctgggagtgacaatggacgtgctgtctcagaaccagaaactgatcgccaatgcattcaacaatgctctgcacgccatccagcaagggtttgacgctacaaattctgccctcgtaaaaatccaggccgtggtgaatgctaacgccgaagcccttaataatctgctccagcagctttctaaccgctttggagctatttctgcctcactgcaggaaattctatccagactggatccccctgaggcagaagcccaaatcgaccgtctcataaacggcagactcactgctcttaacgcctacgttagtcaacaattgagcgattcgaccttggtgaaattcagcgcagctcaggctatggagaaggtgaacgagtgcgtgaagtcacagagctccagaatcaatttctgtggcaatgggaaccatatcatctccttggttcagaatgctccctacggcctgtatttcatccacttcaactacgtgcccacgaagtacgttacagccaaagtgtcccccggactgtgcatcgctggtaacaggggcattgcaccaaaatccggctacttcgtcaatgtcaacaacacatggatgtatactgggagtggttattattaccctgaacctataacagagaacaatgtagtagtcatgtccacatgcgccgtcaattatactaaggccccctatgttatgctcaacacttcaattcccaatctcccggatttcaaagaagagctggatcagtggtttaagaatcagacatccgtggcccctgacttaagcttggattatatcaatgtgacttttttagacttacaggtcgagatgaaccgactccaggaagctataaaagtactgaaccactcctatatcaatctgaaagatatcggtacatacgaatattacgtaaaatggccttggtatgtgtggctactaatttgccttgcgggcgtggctatgctggtcctgctgttcttcattagcttctggatgtgctctaatgggtctctacagtgtagaatatgtatttga

SEQ ID NO: 142 - protein, 1370 aa, Artificial Sequence
  PDI-OC43-wtTMCT-AA
MAKNVAIFGLLFSLLVLVPSQIFAVIGDLNCTLDPRLKGSFNNRDTGPPSISIDTVDVTNGLGTYYVLDRVYLNTTLFLNGYYPTSGSTYRNMALKGTDLLSTLWFKPPFLSDFINGIFAKVKNTKVFKDGVMYSEFPAITIGSTFVNTSYSVVVQPRTINSTQDGVNKLQGLLEVSVCQYNMCEYPHTICHPNLGNHFKELWHYDTGVVSCLYKRNFTYDVNATYLYFHFYQEGGTFYAYFTDTGFVTKFLFNVYLGMALSHYYVMPLTCIRRPKDGFSLEYWVTPLTPRQYLLAFNQDGIIFNAVDCMSDFMSEIKCKTQSIAPPTGVYELNGYTVQPVADVYRRKPDLPNCNIEAWLNDKSVPSPLNWERKTFSNCNFNMSSLMSFIQADSFTCNNIDAAKIYGMCFSSITIDKFAIPNRRKVDLQLGNLGYLQSSNYRIDTTATSCQLYYNLPAANVSVSRFNPSTWNKRFGFIEDSVFVPQPTGVFTNHSVVYAQHCFKAPKNFCPCSSCSCPGKNNGIGTCPAGTNSLTCDNLCTLDPITLKAPDTYKCPQSKSLVGIGEHCSGLAVKSDYCGNNSCTCQPQAFLGWSADSCLQGDKCNIFANFILHDVNNGLTCSTDLQKANTEIELGVCVNYDLYGISGQGIFVEVNATYYNSWQNLLYDSNGNLYGFRDYITNRTFMIHSCYSGRVSAAYHANSSEPALLFRNIKCNYVFNNSLTRQLQPINYSFDSYLGCVVNAYNSTAISVQTCDLTVGSGYCVDYSKNGGSGSAITTGYRFTNFEPFTVNSVNDSLEPVGGLYEIQIPSEFTIGNMEEFIQTSSPKVTIDCAAFVCGDYAACKLQLVEYGSFCDNINAILTEVNELLDTTQLQVANSLMNGVTLSTKLKDGVNFNVDDINFSPVLGCLGSECSKASSRSAIEDLLFDKVKLSDVGFVEAYNNCTGGAEIRDLICVQSYKGIKVLPPLLSENQISGYTLAATSASLFPPWTAAAGVPFYLNVQYRINGLGVTMDVLSQNQKLIANAFNNALHAIQQGFDATNSALVKIQAVVNANAEALNNLLQQLSNRFGAISASLQEILSRLDPPEAEAQIDRLINGRLTALNAYVSQQLSDSTLVKFSAAQAMEKVNECVKSQSSRINFCGNGNHIISLVQNAPYGLYFIHFNYVPTKYVTAKVSPGLCIAGNRGIAPKSGYFVNVNNTWMYTGSGYYYPEPITENNVVVMSTCAVNYTKAPYVMLNTSIPNLPDFKEELDQWFKNQTSVAPDLSLDYINVTFLDLQVEMNRLQEAIKVLNHSYINLKDIGTYEYYVKWPWYVWLLICLAGVAMLVLLFFICCCTGCGTSCFKKCGGCCDDYTGYQELVIKTSHDD

SEQ ID NO: 143 - protein, 1354 aa, Artificial Sequence
  PDI-OC43-H5iTMCT-AA
MAKNVAIFGLLFSLLVLVPSQIFAVIGDLNCTLDPRLKGSFNNRDTGPPSISIDTVDVTNGLGTYYVLDRVYLNTTLFLNGYYPTSGSTYRNMALKGTDLLSTLWFKPPFLSDFINGIFAKVKNTKVFKDGVMYSEFPAITIGSTFVNTSYSVVVQPRTINSTQDGVNKLQGLLEVSVCQYNMCEYPHTICHPNLGNHFKELWHYDTGVVSCLYKRNFTYDVNATYLYFHFYQEGGTFYAYFTDTGFVTKFLFNVYLGMALSHYYVMPLTCIRRPKDGFSLEYWVTPLTPRQYLLAFNQDGIIFNAVDCMSDFMSEIKCKTQSIAPPTGVYELNGYTVQPVADVYRRKPDLPNCNIEAWLNDKSVPSPLNWERKTFSNCNFNMSSLMSFIQADSFTCNNIDAAKIYGMCFSSITIDKFAIPNRRKVDLQLGNLGYLQSSNYRIDTTATSCQLYYNLPAANVSVSRFNPSTWNKRFGFIEDSVFVPQPTGVFTNHSVVYAQHCFKAPKNFCPCSSCSCPGKNNGIGTCPAGTNSLTCDNLCTLDPITLKAPDTYKCPQSKSLVGIGEHCSGLAVKSDYCGNNSCTCQPQAFLGWSADSCLQGDKCNIFANFILHDVNNGLTCSTDLQKANTEIELGVCVNYDLYGISGQGIFVEVNATYYNSWQNLLYDSNGNLYGFRDYITNRTFMIHSCYSGRVSAAYHANSSEPALLFRNIKCNYVFNNSLTRQLQPINYSFDSYLGCVVNAYNSTAISVQTCDLTVGSGYCVDYSKNGGSGSAITTGYRFTNFEPFTVNSVNDSLEPVGGLYEIQIPSEFTIGNMEEFIQTSSPKVTIDCAAFVCGDYAACKLQLVEYGSFCDNINAILTEVNELLDTTQLQVANSLMNGVTLSTKLKDGVNFNVDDINFSPVLGCLGSECSKASSRSAIEDLLFDKVKLSDVGFVEAYNNCTGGAEIRDLICVQSYKGIKVLPPLLSENQISGYTLAATSASLFPPWTAAAGVPFYLNVQYRINGLGVTMDVLSQNQKLIANAFNNALHAIQQGFDATNSALVKIQAVVNANAEALNNLLQQLSNRFGAISASLQEILSRLDPPEAEAQIDRLINGRLTALNAYVSQQLSDSTLVKFSAAQAMEKVNECVKSQSSRINFCGNGNHIISLVQNAPYGLYFIHFNYVPTKYVTAKVSPGLCIAGNRGIAPKSGYFVNVNNTWMYTGSGYYYPEPITENNVVVMSTCAVNYTKAPYVMLNTSIPNLPDFKEELDQWFKNQTSVAPDLSLDYINVTFLDLQVEMNRLQEAIKVLNHSYINLKDIGTYEYYVKWPWYQILSIYSTVASSLALAIMMAGLSLWMCSNGSLQCRICI

SEQ ID NO: 144 - protein, 1351 aa, Artificial Sequence
  PDI-OC43-H5iCT-AA
MAKNVAIFGLLFSLLVLVPSQIFAVIGDLNCTLDPRLKGSFNNRDTGPPSISIDTVDVTNGLGTYYVLDRVYLNTTLFLNGYYPTSGSTYRNMALKGTDLLSTLWFKPPFLSDFINGIFAKVKNTKVFKDGVMYSEFPAITIGSTFVNTSYSVVVQPRTINSTQDGVNKLQGLLEVSVCQYNMCEYPHTICHPNLGNHFKELWHYDTGVVSCLYKRNFTYDVNATYLYFHFYQEGGTFYAYFTDTGFVTKFLFNVYLGMALSHYYVMPLTCIRRPKDGFSLEYWVTPLTPRQYLLAFNQDGIIFNAVDCMSDFMSEIKCKTQSIAPPTGVYELNGYTVQPVADVYRRKPDLPNCNIEAWLNDKSVPSPLNWERKTFSNCNFNMSSLMSFIQADSFTCNNIDAAKIYGMCFSSITIDKFAIPNRRKVDLQLGNLGYLQSSNYRIDTTATSCQLYYNLPAANVSVSRFNPSTWNKRFGFIEDSVFVPQPTGVFTNHSVVYAQHCFKAPKNFCPCSSCSCPGKNNGIGTCPAGTNSLTCDNLCTLDPITLKAPDTYKCPQSKSLVGIGEHCSGLAVKSDYCGNNSCTCQPQAFLGWSADSCLQGDKCNIFANFILHDVNNGLTCSTDLQKANTEIELGVCVNYDLYGISGQGIFVEVNATYYNSWQNLLYDSNGNLYGFRDYITNRTFMIHSCYSGRVSAAYHANSSEPALLFRNIKCNYVFNNSLTRQLQPINYSFDSYLGCVVNAYNSTAISVQTCDLTVGSGYCVDYSKNGGSGSAITTGYRFTNFEPFTVNSVNDSLEPVGGLYEIQIPSEFTIGNMEEFIQTSSPKVTIDCAAFVCGDYAACKLQLVEYGSFCDNINAILTEVNELLDTTQLQVANSLMNGVTLSTKLKDGVNFNVDDINFSPVLGCLGSECSKASSRSAIEDLLFDKVKLSDVGFVEAYNNCTGGAEIRDLICVQSYKGIKVLPPLLSENQISGYTLAATSASLFPPWTAAAGVPFYLNVQYRINGLGVTMDVLSQNQKLIANAFNNALHAIQQGFDATNSALVKIQAVVNANAEALNNLLQQLSNRFGAISASLQEILSRLDPPEAEAQIDRLINGRLTALNAYVSQQLSDSTLVKFSAAQAMEKVNECVKSQSSRINFCGNGNHIISLVQNAPYGLYFIHFNYVPTKYVTAKVSPGLCIAGNRGIAPKSGYFVNVNNTWMYTGSGYYYPEPITENNVVVMSTCAVNYTKAPYVMLNTSIPNLPDFKEELDQWFKNQTSVAPDLSLDYINVTFLDLQVEMNRLQEAIKVLNHSYINLKDIGTYEYYVKWPWYVWLLICLAGVAMLVLLFFISLWMCSNGSLQCRICI

SEQ ID NO: 145 - protein, 1348 aa, Artificial Sequence
  PDI-OC43-H5iCT(V4)-AA
MAKNVAIFGLLFSLLVLVPSQIFAVIGDLNCTLDPRLKGSFNNRDTGPPSISIDTVDVTNGLGTYYVLDRVYLNTTLFLNGYYPTSGSTYRNMALKGTDLLSTLWFKPPFLSDFINGIFAKVKNTKVFKDGVMYSEFPAITIGSTFVNTSYSVVVQPRTINSTQDGVNKLQGLLEVSVCQYNMCEYPHTICHPNLGNHFKELWHYDTGVVSCLYKRNFTYDVNATYLYFHFYQEGGTFYAYFTDTGFVTKFLFNVYLGMALSHYYVMPLTCIRRPKDGFSLEYWVTPLTPRQYLLAFNQDGIIFNAVDCMSDFMSEIKCKTQSIAPPTGVYELNGYTVQPVADVYRRKPDLPNCNIEAWLNDKSVPSPLNWERKTFSNCNFNMSSLMSFIQADSFTCNNIDAAKIYGMCFSSITIDKFAIPNRRKVDLQLGNLGYLQSSNYRIDTTATSCQLYYNLPAANVSVSRFNPSTWNKRFGFIEDSVFVPQPTGVFTNHSVVYAQHCFKAPKNFCPCSSCSCPGKNNGIGTCPAGTNSLTCDNLCTLDPITLKAPDTYKCPQSKSLVGIGEHCSGLAVKSDYCGNNSCTCQPQAFLGWSADSCLQGDKCNIFANFILHDVNNGLTCSTDLQKANTEIELGVCVNYDLYGISGQGIFVEVNATYYNSWQNLLYDSNGNLYGFRDYITNRTFMIHSCYSGRVSAAYHANSSEPALLFRNIKCNYVFNNSLTRQLQPINYSFDSYLGCVVNAYNSTAISVQTCDLTVGSGYCVDYSKNGGSGSAITTGYRFTNFEPFTVNSVNDSLEPVGGLYEIQIPSEFTIGNMEEFIQTSSPKVTIDCAAFVCGDYAACKLQLVEYGSFCDNINAILTEVNELLDTTQLQVANSLMNGVTLSTKLKDGVNFNVDDINFSPVLGCLGSECSKASSRSAIEDLLFDKVKLSDVGFVEAYNNCTGGAEIRDLICVQSYKGIKVLPPLLSENQISGYTLAATSASLFPPWTAAAGVPFYLNVQYRINGLGVTMDVLSQNQKLIANAFNNALHAIQQGFDATNSALVKIQAVVNANAEALNNLLQQLSNRFGAISASLQEILSRLDPPEAEAQIDRLINGRLTALNAYVSQQLSDSTLVKFSAAQAMEKVNECVKSQSSRINFCGNGNHIISLVQNAPYGLYFIHFNYVPTKYVTAKVSPGLCIAGNRGIAPKSGYFVNVNNTWMYTGSGYYYPEPITENNVVVMSTCAVNYTKAPYVMLNTSIPNLPDFKEELDQWFKNQTSVAPDLSLDYINVTFLDLQVEMNRLQEAIKVLNHSYINLKDIGTYEYYVKWPWYVWLLICLAGVAMLVLLFFICCSNGSLQCRICI

SEQ ID NO: 146 - protein, 1351 aa, Artificial Sequence
  PDI-OC43-H1cCT-AA
MAKNVAIFGLLFSLLVLVPSQIFAVIGDLNCTLDPRLKGSFNNRDTGPPSISIDTVDVTNGLGTYYVLDRVYLNTTLFLNGYYPTSGSTYRNMALKGTDLLSTLWFKPPFLSDFINGIFAKVKNTKVFKDGVMYSEFPAITIGSTFVNTSYSVVVQPRTINSTQDGVNKLQGLLEVSVCQYNMCEYPHTICHPNLGNHFKELWHYDTGVVSCLYKRNFTYDVNATYLYFHFYQEGGTFYAYFTDTGFVTKFLFNVYLGMALSHYYVMPLTCIRRPKDGFSLEYWVTPLTPRQYLLAFNQDGIIFNAVDCMSDFMSEIKCKTQSIAPPTGVYELNGYTVQPVADVYRRKPDLPNCNIEAWLNDKSVPSPLNWERKTFSNCNFNMSSLMSFIQADSFTCNNIDAAKIYGMCFSSITIDKFAIPNRRKVDLQLGNLGYLQSSNYRIDTTATSCQLYYNLPAANVSVSRFNPSTWNKRFGFIEDSVFVPQPTGVFTNHSVVYAQHCFKAPKNFCPCSSCSCPGKNNGIGTCPAGTNSLTCDNLCTLDPITLKAPDTYKCPQSKSLVGIGEHCSGLAVKSDYCGNNSCTCQPQAFLGWSADSCLQGDKCNIFANFILHDVNNGLTCSTDLQKANTEIELGVCVNYDLYGISGQGIFVEVNATYYNSWQNLLYDSNGNLYGFRDYITNRTFMIHSCYSGRVSAAYHANSSEPALLFRNIKCNYVFNNSLTRQLQPINYSFDSYLGCVVNAYNSTAISVQTCDLTVGSGYCVDYSKNGGSGSAITTGYRFTNFEPFTVNSVNDSLEPVGGLYEIQIPSEFTIGNMEEFIQTSSPKVTIDCAAFVCGDYAACKLQLVEYGSFCDNINAILTEVNELLDTTQLQVANSLMNGVTLSTKLKDGVNFNVDDINFSPVLGCLGSECSKASSRSAIEDLLFDKVKLSDVGFVEAYNNCTGGAEIRDLICVQSYKGIKVLPPLLSENQISGYTLAATSASLFPPWTAAAGVPFYLNVQYRINGLGVTMDVLSQNQKLIANAFNNALHAIQQGFDATNSALVKIQAVVNANAEALNNLLQQLSNRFGAISASLQEILSRLDPPEAEAQIDRLINGRLTALNAYVSQQLSDSTLVKFSAAQAMEKVNECVKSQSSRINFCGNGNHIISLVQNAPYGLYFIHFNYVPTKYVTAKVSPGLCIAGNRGIAPKSGYFVNVNNTWMYTGSGYYYPEPITENNVVVMSTCAVNYTKAPYVMLNTSIPNLPDFKEELDQWFKNQTSVAPDLSLDYINVTFLDLQVEMNRLQEAIKVLNHSYINLKDIGTYEYYVKWPWYVWLLICLAGVAMLVLLFFISFWMCSNGSLQCRICI

SEQ ID NO: 147 - DNA, 48 bp, Artificial Sequence
  IF(CoV229EwtCT).r
acgacacgactaaggccttcactgtatgtggatcttttcgacatcgta

SEQ ID NO: 148 - DNA, 3546 bp, Artificial Sequence
  PDI-229E -wtTMCT-DNA
atggcgaaaaacgttgcgattttcggcttattgttttctcttcttgtgttggttccttctcagatcttcgcgcaaacgactaatgggctgaacaccagttacagcgtctgtaacggctgcgtcggatatagcgagaacgtgttcgcagtggaaagtggggggtacattccttccgacttcgctttcaataactggtttctcctgactaacacaagctccgtcgtggatggcgtggtcaggtcctttcagcctcttctcctgaattgcctgtggtctgtgtccgggttaagattcactacaggcttcgtatacttcaacgggacgggccggggggattgcaagggcttctcctccgacgtgctgtcagatgtgatccgttacaatctgaacttcgaagagaacttacggcgggggacaatcctgttcaaaacatcatatggcgtagtcgtattttactgcaccaataataccctggtgagtggggacgcccatattcccttcggaacagtgctgggtaacttttactgttttgtcaacactacgatcggaaacgaaaccactagcgcctttgtcggagctctgccaaaaacagttagggagttcgtgatctctcggaccggtcacttctatatcaacggctaccgttattttactttgggcaacgtcgaagccgtcaattttaatgtgacaactgcagagacaactgacttttgcactgtggctctcgccagttatgccgatgtgctggtgaatgtaagtcaaacgtcaattgccaacatcatctattgtaactcagtaatcaaccggctccgctgtgaccaactctcattcgacgtccccgacggattctattccacgagcccgattcagagcgtggaactgccagtttccatcgtatccctcccagtttaccacaagcacacttttatcgttctctacgtagattttaaaccccagtcaggaggagggaaatgcttcaactgctacccggctggcgtgaacatcaccttggccaattttaatgaaactaaagggcccctttgcgtggatacgtcacactttaccacaaagtatgttgcagtctatgctaacgtcggcaggtggtcagcgtccattaacacaggcaattgcccgttctctttcgggaaagtgaacaacttcgtgaagtttggaagtgtgtgcttcagtttgaaagacattccgggcggctgcgccatgcctattgtggctaattgggcttattccaagtactacaccattggctctctctacgttagctggagcgacggtgacggtataacgggcgtaccacaaccggtggaaggggtcagctctttcatgaatgtcactctggacaagtgtaccaaatataatatatacgatgtgagtggagtgggcgttatacgcgtgtctaacgacacctttctaaacggcataacctacacaagcacgtcaggcaatctgttaggttttaaagacgtcactaaaggcactatatatagcatcaccccatgcaacccacctgatcaattagtcgtatatcagcaagctgttgtgggtgctatgctgtcagaaaacttcaccagctacgggttctccaatgtggtggaactgcccaaattcttttacgctagcaatggcacatataactgtactgacgccgtcttgacttacagttcattcggagtgtgcgcggacggcagcattatcgccgtgcagccggccaatgtcagctatgattccgtttccgccatcgtgacagccaacttgtcgattccctctaactggacaacgtctgtccaagtcgaatatctgcagatcacctcaacccccatagtagtcgattgctcaacctacgtctgcaacggtaatgtcagatgtgtcgagctgctcaagcagtacacctccgcctgtaagactattgaggatgcattaagaaatagtgcaagattggaaagcgccgatgtgtcggaaatgctaaccttcgataagaaggcattcacactggcgaacgtaagctctttcggcgattacaacctgtcttcggtaatccctagcttgcccacatccggctctcgggtggcggggcggagcgctatcgaggacattttattctcgaaactggttacatctgggctcggaactgtggacgccgattacaagaagtgcaccaagggcctaagcatcgccgacctcgcctgtgctcagtactacaacggaattatggtgctgccaggtgtcgctgacgcagagcggatggctatgtataccggcagtctcattggcgggattgcgttgggcggcctgacgtccgctgtctccatccctttctctctggctatacaagcccgactgaattatgtggccctgcagactgatgtcctgcaagaaaatcagaagattcttgccgccagcttcaacaaggccatgactaatattgtggatgcgtttaccggagtgaatgacgccatcacccaaacgtcccaagccctgcagacagtcgccacggcgttaaacaaaatccaggatgtagtgaatcagcaagggaacagcttgaatcacctgacgtcccagttaagacagaactttcaggcaatcagtagctcaatccaggctatctacgatcgattagatcctcctcaggcagatcagcaggtggatcggctcatcaccggccgcctcgcggcattgaatgttttcgtaagtcataccttgaccaagtacacggaggtgagggccagtcgccagctggctcagcaaaaagtgaatgagtgtgtgaaatcacagagcaaacggtacgggttttgtggaaatgggacgcacatctttagcatcgttaatgctgcccccgaagggttagtcttcctgcacactgtgctccttcctacccagtataaagatgtcgaagcatggtctgggctctgtgtcgatggaactaacggttatgtccttcgacagccaaacctcgctctctataaagaagggaattactataggatcacctcaagaatcatgttcgagcccaggataccaacaatggccgattttgtgcagattgaaaattgtaacgtgacctttgtgaatatcagtcgatccgagcttcaaacgattgttcctgagtacatcgacgtgaataaaactctacaagagctgtcctataaactgcctaattataccgtgcctgaccttgtagtcgagcaatacaaccagactattctgaacctgacatcggaaatctctacattggagaataaaagcgccgagctcaattacacagtgcagaagctgcagaccctgatcgacaatattaacagcactcttgtggacttaaagtggctgaaccgtgtggagacttacatcaagtggccctggtgggtgtggctctgtatttccgtggtccttatatttgttgtaagtatgctgctcctgtgctgttgctcaaccgggtgctgcggttttttctcctgtttcgcctcatccatccgtggctgttgtgagagcactaaactgccatattacgatgtcgaaaagatccacatacagtga

SEQ ID NO: 149 - DNA, 3492 bp, Artificial Sequence
  PDI-229E -H5iTMCT-DNA
atggcgaaaaacgttgcgattttcggcttattgttttctcttcttgtgttggttccttctcagatcttcgcgcaaacgactaatgggctgaacaccagttacagcgtctgtaacggctgcgtcggatatagcgagaacgtgttcgcagtggaaagtggggggtacattccttccgacttcgctttcaataactggtttctcctgactaacacaagctccgtcgtggatggcgtggtcaggtcctttcagcctcttctcctgaattgcctgtggtctgtgtccgggttaagattcactacaggcttcgtatacttcaacgggacgggccggggggattgcaagggcttctcctccgacgtgctgtcagatgtgatccgttacaatctgaacttcgaagagaacttacggcgggggacaatcctgttcaaaacatcatatggcgtagtcgtattttactgcaccaataataccctggtgagtggggacgcccatattcccttcggaacagtgctgggtaacttttactgttttgtcaacactacgatcggaaacgaaaccactagcgcctttgtcggagctctgccaaaaacagttagggagttcgtgatctctcggaccggtcacttctatatcaacggctaccgttattttactttgggcaacgtcgaagccgtcaattttaatgtgacaactgcagagacaactgacttttgcactgtggctctcgccagttatgccgatgtgctggtgaatgtaagtcaaacgtcaattgccaacatcatctattgtaactcagtaatcaaccggctccgctgtgaccaactctcattcgacgtccccgacggattctattccacgagcccgattcagagcgtggaactgccagtttccatcgtatccctcccagtttaccacaagcacacttttatcgttctctacgtagattttaaaccccagtcaggaggagggaaatgcttcaactgctacccggctggcgtgaacatcaccttggccaattttaatgaaactaaagggcccctttgcgtggatacgtcacactttaccacaaagtatgttgcagtctatgctaacgtcggcaggtggtcagcgtccattaacacaggcaattgcccgttctctttcgggaaagtgaacaacttcgtgaagtttggaagtgtgtgcttcagtttgaaagacattccgggcggctgcgccatgcctattgtggctaattgggcttattccaagtactacaccattggctctctctacgttagctggagcgacggtgacggtataacgggcgtaccacaaccggtggaaggggtcagctctttcatgaatgtcactctggacaagtgtaccaaatataatatatacgatgtgagtggagtgggcgttatacgcgtgtctaacgacacctttctaaacggcataacctacacaagcacgtcaggcaatctgttaggttttaaagacgtcactaaaggcactatatatagcatcaccccatgcaacccacctgatcaattagtcgtatatcagcaagctgttgtgggtgctatgctgtcagaaaacttcaccagctacgggttctccaatgtggtggaactgcccaaattcttttacgctagcaatggcacatataactgtactgacgccgtcttgacttacagttcattcggagtgtgcgcggacggcagcattatcgccgtgcagccggccaatgtcagctatgattccgtttccgccatcgtgacagccaacttgtcgattccctctaactggacaacgtctgtccaagtcgaatatctgcagatcacctcaacccccatagtagtcgattgctcaacctacgtctgcaacggtaatgtcagatgtgtcgagctgctcaagcagtacacctccgcctgtaagactattgaggatgcattaagaaatagtgcaagattggaaagcgccgatgtgtcggaaatgctaaccttcgataagaaggcattcacactggcgaacgtaagctctttcggcgattacaacctgtcttcggtaatccctagcttgcccacatccggctctcgggtggcggggcggagcgctatcgaggacattttattctcgaaactggttacatctgggctcggaactgtggacgccgattacaagaagtgcaccaagggcctaagcatcgccgacctcgcctgtgctcagtactacaacggaattatggtgctgccaggtgtcgctgacgcagagcggatggctatgtataccggcagtctcattggcgggattgcgttgggcggcctgacgtccgctgtctccatccctttctctctggctatacaagcccgactgaattatgtggccctgcagactgatgtcctgcaagaaaatcagaagattcttgccgccagcttcaacaaggccatgactaatattgtggatgcgtttaccggagtgaatgacgccatcacccaaacgtcccaagccctgcagacagtcgccacggcgttaaacaaaatccaggatgtagtgaatcagcaagggaacagcttgaatcacctgacgtcccagttaagacagaactttcaggcaatcagtagctcaatccaggctatctacgatcgattagatcctcctcaggcagatcagcaggtggatcggctcatcaccggccgcctcgcggcattgaatgttttcgtaagtcataccttgaccaagtacacggaggtgagggccagtcgccagctggctcagcaaaaagtgaatgagtgtgtgaaatcacagagcaaacggtacgggttttgtggaaatgggacgcacatctttagcatcgttaatgctgcccccgaagggttagtcttcctgcacactgtgctccttcctacccagtataaagatgtcgaagcatggtctgggctctgtgtcgatggaactaacggttatgtccttcgacagccaaacctcgctctctataaagaagggaattactataggatcacctcaagaatcatgttcgagcccaggataccaacaatggccgattttgtgcagattgaaaattgtaacgtgacctttgtgaatatcagtcgatccgagcttcaaacgattgttcctgagtacatcgacgtgaataaaactctacaagagctgtcctataaactgcctaattataccgtgcctgaccttgtagtcgagcaatacaaccagactattctgaacctgacatcggaaatctctacattggagaataaaagcgccgagctcaattacacagtgcagaagctgcagaccctgatcgacaatattaacagcactcttgtggacttaaagtggctgaaccgtgtggagacttacatcaagtggccctggtggcaaatactgtcaatttattcaacagtggcgagttccctagcactggcaatcatgatggctggtctatctttatggatgtgctccaatggatcgttacaatgcagaatttgcatttga

SEQ ID NO: 150 - DNA, 3480 bp, Artificial Sequence
  PDI-229E -H5iCT-DNA
atggcgaaaaacgttgcgattttcggcttattgttttctcttcttgtgttggttccttctcagatcttcgcgcaaacgactaatgggctgaacaccagttacagcgtctgtaacggctgcgtcggatatagcgagaacgtgttcgcagtggaaagtggggggtacattccttccgacttcgctttcaataactggtttctcctgactaacacaagctccgtcgtggatggcgtggtcaggtcctttcagcctcttctcctgaattgcctgtggtctgtgtccgggttaagattcactacaggcttcgtatacttcaacgggacgggccggggggattgcaagggcttctcctccgacgtgctgtcagatgtgatccgttacaatctgaacttcgaagagaacttacggcgggggacaatcctgttcaaaacatcatatggcgtagtcgtattttactgcaccaataataccctggtgagtggggacgcccatattcccttcggaacagtgctgggtaacttttactgttttgtcaacactacgatcggaaacgaaaccactagcgcctttgtcggagctctgccaaaaacagttagggagttcgtgatctctcggaccggtcacttctatatcaacggctaccgttattttactttgggcaacgtcgaagccgtcaattttaatgtgacaactgcagagacaactgacttttgcactgtggctctcgccagttatgccgatgtgctggtgaatgtaagtcaaacgtcaattgccaacatcatctattgtaactcagtaatcaaccggctccgctgtgaccaactctcattcgacgtccccgacggattctattccacgagcccgattcagagcgtggaactgccagtttccatcgtatccctcccagtttaccacaagcacacttttatcgttctctacgtagattttaaaccccagtcaggaggagggaaatgcttcaactgctacccggctggcgtgaacatcaccttggccaattttaatgaaactaaagggcccctttgcgtggatacgtcacactttaccacaaagtatgttgcagtctatgctaacgtcggcaggtggtcagcgtccattaacacaggcaattgcccgttctctttcgggaaagtgaacaacttcgtgaagtttggaagtgtgtgcttcagtttgaaagacattccgggcggctgcgccatgcctattgtggctaattgggcttattccaagtactacaccattggctctctctacgttagctggagcgacggtgacggtataacgggcgtaccacaaccggtggaaggggtcagctctttcatgaatgtcactctggacaagtgtaccaaatataatatatacgatgtgagtggagtgggcgttatacgcgtgtctaacgacacctttctaaacggcataacctacacaagcacgtcaggcaatctgttaggttttaaagacgtcactaaaggcactatatatagcatcaccccatgcaacccacctgatcaattagtcgtatatcagcaagctgttgtgggtgctatgctgtcagaaaacttcaccagctacgggttctccaatgtggtggaactgcccaaattcttttacgctagcaatggcacatataactgtactgacgccgtcttgacttacagttcattcggagtgtgcgcggacggcagcattatcgccgtgcagccggccaatgtcagctatgattccgtttccgccatcgtgacagccaacttgtcgattccctctaactggacaacgtctgtccaagtcgaatatctgcagatcacctcaacccccatagtagtcgattgctcaacctacgtctgcaacggtaatgtcagatgtgtcgagctgctcaagcagtacacctccgcctgtaagactattgaggatgcattaagaaatagtgcaagattggaaagcgccgatgtgtcggaaatgctaaccttcgataagaaggcattcacactggcgaacgtaagctctttcggcgattacaacctgtcttcggtaatccctagcttgcccacatccggctctcgggtggcggggcggagcgctatcgaggacattttattctcgaaactggttacatctgggctcggaactgtggacgccgattacaagaagtgcaccaagggcctaagcatcgccgacctcgcctgtgctcagtactacaacggaattatggtgctgccaggtgtcgctgacgcagagcggatggctatgtataccggcagtctcattggcgggattgcgttgggcggcctgacgtccgctgtctccatccctttctctctggctatacaagcccgactgaattatgtggccctgcagactgatgtcctgcaagaaaatcagaagattcttgccgccagcttcaacaaggccatgactaatattgtggatgcgtttaccggagtgaatgacgccatcacccaaacgtcccaagccctgcagacagtcgccacggcgttaaacaaaatccaggatgtagtgaatcagcaagggaacagcttgaatcacctgacgtcccagttaagacagaactttcaggcaatcagtagctcaatccaggctatctacgatcgattagatcctcctcaggcagatcagcaggtggatcggctcatcaccggccgcctcgcggcattgaatgttttcgtaagtcataccttgaccaagtacacggaggtgagggccagtcgccagctggctcagcaaaaagtgaatgagtgtgtgaaatcacagagcaaacggtacgggttttgtggaaatgggacgcacatctttagcatcgttaatgctgcccccgaagggttagtcttcctgcacactgtgctccttcctacccagtataaagatgtcgaagcatggtctgggctctgtgtcgatggaactaacggttatgtccttcgacagccaaacctcgctctctataaagaagggaattactataggatcacctcaagaatcatgttcgagcccaggataccaacaatggccgattttgtgcagattgaaaattgtaacgtgacctttgtgaatatcagtcgatccgagcttcaaacgattgttcctgagtacatcgacgtgaataaaactctacaagagctgtcctataaactgcctaattataccgtgcctgaccttgtagtcgagcaatacaaccagactattctgaacctgacatcggaaatctctacattggagaataaaagcgccgagctcaattacacagtgcagaagctgcagaccctgatcgacaatattaacagcactcttgtggacttaaagtggctgaaccgtgtggagacttacatcaagtggccctggtgggtgtggctctgtatttccgtggtccttatatttgttgtaagtatgctgctcctgtctttatggatgtgctccaatggatcgttacaatgcagaatttgcatttga

SEQ ID NO: 151 - DNA, 3471 bp, Artificial Sequence
  PDI-229E -H5iCT(V4)-DNA
atggcgaaaaacgttgcgattttcggcttattgttttctcttcttgtgttggttccttctcagatcttcgcgcaaacgactaatgggctgaacaccagttacagcgtctgtaacggctgcgtcggatatagcgagaacgtgttcgcagtggaaagtggggggtacattccttccgacttcgctttcaataactggtttctcctgactaacacaagctccgtcgtggatggcgtggtcaggtcctttcagcctcttctcctgaattgcctgtggtctgtgtccgggttaagattcactacaggcttcgtatacttcaacgggacgggccggggggattgcaagggcttctcctccgacgtgctgtcagatgtgatccgttacaatctgaacttcgaagagaacttacggcgggggacaatcctgttcaaaacatcatatggcgtagtcgtattttactgcaccaataataccctggtgagtggggacgcccatattcccttcggaacagtgctgggtaacttttactgttttgtcaacactacgatcggaaacgaaaccactagcgcctttgtcggagctctgccaaaaacagttagggagttcgtgatctctcggaccggtcacttctatatcaacggctaccgttattttactttgggcaacgtcgaagccgtcaattttaatgtgacaactgcagagacaactgacttttgcactgtggctctcgccagttatgccgatgtgctggtgaatgtaagtcaaacgtcaattgccaacatcatctattgtaactcagtaatcaaccggctccgctgtgaccaactctcattcgacgtccccgacggattctattccacgagcccgattcagagcgtggaactgccagtttccatcgtatccctcccagtttaccacaagcacacttttatcgttctctacgtagattttaaaccccagtcaggaggagggaaatgcttcaactgctacccggctggcgtgaacatcaccttggccaattttaatgaaactaaagggcccctttgcgtggatacgtcacactttaccacaaagtatgttgcagtctatgctaacgtcggcaggtggtcagcgtccattaacacaggcaattgcccgttctctttcgggaaagtgaacaacttcgtgaagtttggaagtgtgtgcttcagtttgaaagacattccgggcggctgcgccatgcctattgtggctaattgggcttattccaagtactacaccattggctctctctacgttagctggagcgacggtgacggtataacgggcgtaccacaaccggtggaaggggtcagctctttcatgaatgtcactctggacaagtgtaccaaatataatatatacgatgtgagtggagtgggcgttatacgcgtgtctaacgacacctttctaaacggcataacctacacaagcacgtcaggcaatctgttaggttttaaagacgtcactaaaggcactatatatagcatcaccccatgcaacccacctgatcaattagtcgtatatcagcaagctgttgtgggtgctatgctgtcagaaaacttcaccagctacgggttctccaatgtggtggaactgcccaaattcttttacgctagcaatggcacatataactgtactgacgccgtcttgacttacagttcattcggagtgtgcgcggacggcagcattatcgccgtgcagccggccaatgtcagctatgattccgtttccgccatcgtgacagccaacttgtcgattccctctaactggacaacgtctgtccaagtcgaatatctgcagatcacctcaacccccatagtagtcgattgctcaacctacgtctgcaacggtaatgtcagatgtgtcgagctgctcaagcagtacacctccgcctgtaagactattgaggatgcattaagaaatagtgcaagattggaaagcgccgatgtgtcggaaatgctaaccttcgataagaaggcattcacactggcgaacgtaagctctttcggcgattacaacctgtcttcggtaatccctagcttgcccacatccggctctcgggtggcggggcggagcgctatcgaggacattttattctcgaaactggttacatctgggctcggaactgtggacgccgattacaagaagtgcaccaagggcctaagcatcgccgacctcgcctgtgctcagtactacaacggaattatggtgctgccaggtgtcgctgacgcagagcggatggctatgtataccggcagtctcattggcgggattgcgttgggcggcctgacgtccgctgtctccatccctttctctctggctatacaagcccgactgaattatgtggccctgcagactgatgtcctgcaagaaaatcagaagattcttgccgccagcttcaacaaggccatgactaatattgtggatgcgtttaccggagtgaatgacgccatcacccaaacgtcccaagccctgcagacagtcgccacggcgttaaacaaaatccaggatgtagtgaatcagcaagggaacagcttgaatcacctgacgtcccagttaagacagaactttcaggcaatcagtagctcaatccaggctatctacgatcgattagatcctcctcaggcagatcagcaggtggatcggctcatcaccggccgcctcgcggcattgaatgttttcgtaagtcataccttgaccaagtacacggaggtgagggccagtcgccagctggctcagcaaaaagtgaatgagtgtgtgaaatcacagagcaaacggtacgggttttgtggaaatgggacgcacatctttagcatcgttaatgctgcccccgaagggttagtcttcctgcacactgtgctccttcctacccagtataaagatgtcgaagcatggtctgggctctgtgtcgatggaactaacggttatgtccttcgacagccaaacctcgctctctataaagaagggaattactataggatcacctcaagaatcatgttcgagcccaggataccaacaatggccgattttgtgcagattgaaaattgtaacgtgacctttgtgaatatcagtcgatccgagcttcaaacgattgttcctgagtacatcgacgtgaataaaactctacaagagctgtcctataaactgcctaattataccgtgcctgaccttgtagtcgagcaatacaaccagactattctgaacctgacatcggaaatctctacattggagaataaaagcgccgagctcaattacacagtgcagaagctgcagaccctgatcgacaatattaacagcactcttgtggacttaaagtggctgaaccgtgtggagacttacatcaagtggccctggtgggtgtggctctgtatttccgtggtccttatatttgttgtaagtatgctgctcctgtgctgctccaatggatcgttacaatgcagaatttgcatttga

SEQ ID NO: 152 - DNA, 3480 bp, Artificial Sequence
  PDI-229E -H1cCT-DNA
atggcgaaaaacgttgcgattttcggcttattgttttctcttcttgtgttggttccttctcagatcttcgcgcaaacgactaatgggctgaacaccagttacagcgtctgtaacggctgcgtcggatatagcgagaacgtgttcgcagtggaaagtggggggtacattccttccgacttcgctttcaataactggtttctcctgactaacacaagctccgtcgtggatggcgtggtcaggtcctttcagcctcttctcctgaattgcctgtggtctgtgtccgggttaagattcactacaggcttcgtatacttcaacgggacgggccggggggattgcaagggcttctcctccgacgtgctgtcagatgtgatccgttacaatctgaacttcgaagagaacttacggcgggggacaatcctgttcaaaacatcatatggcgtagtcgtattttactgcaccaataataccctggtgagtggggacgcccatattcccttcggaacagtgctgggtaacttttactgttttgtcaacactacgatcggaaacgaaaccactagcgcctttgtcggagctctgccaaaaacagttagggagttcgtgatctctcggaccggtcacttctatatcaacggctaccgttattttactttgggcaacgtcgaagccgtcaattttaatgtgacaactgcagagacaactgacttttgcactgtggctctcgccagttatgccgatgtgctggtgaatgtaagtcaaacgtcaattgccaacatcatctattgtaactcagtaatcaaccggctccgctgtgaccaactctcattcgacgtccccgacggattctattccacgagcccgattcagagcgtggaactgccagtttccatcgtatccctcccagtttaccacaagcacacttttatcgttctctacgtagattttaaaccccagtcaggaggagggaaatgcttcaactgctacccggctggcgtgaacatcaccttggccaattttaatgaaactaaagggcccctttgcgtggatacgtcacactttaccacaaagtatgttgcagtctatgctaacgtcggcaggtggtcagcgtccattaacacaggcaattgcccgttctctttcgggaaagtgaacaacttcgtgaagtttggaagtgtgtgcttcagtttgaaagacattccgggcggctgcgccatgcctattgtggctaattgggcttattccaagtactacaccattggctctctctacgttagctggagcgacggtgacggtataacgggcgtaccacaaccggtggaaggggtcagctctttcatgaatgtcactctggacaagtgtaccaaatataatatatacgatgtgagtggagtgggcgttatacgcgtgtctaacgacacctttctaaacggcataacctacacaagcacgtcaggcaatctgttaggttttaaagacgtcactaaaggcactatatatagcatcaccccatgcaacccacctgatcaattagtcgtatatcagcaagctgttgtgggtgctatgctgtcagaaaacttcaccagctacgggttctccaatgtggtggaactgcccaaattcttttacgctagcaatggcacatataactgtactgacgccgtcttgacttacagttcattcggagtgtgcgcggacggcagcattatcgccgtgcagccggccaatgtcagctatgattccgtttccgccatcgtgacagccaacttgtcgattccctctaactggacaacgtctgtccaagtcgaatatctgcagatcacctcaacccccatagtagtcgattgctcaacctacgtctgcaacggtaatgtcagatgtgtcgagctgctcaagcagtacacctccgcctgtaagactattgaggatgcattaagaaatagtgcaagattggaaagcgccgatgtgtcggaaatgctaaccttcgataagaaggcattcacactggcgaacgtaagctctttcggcgattacaacctgtcttcggtaatccctagcttgcccacatccggctctcgggtggcggggcggagcgctatcgaggacattttattctcgaaactggttacatctgggctcggaactgtggacgccgattacaagaagtgcaccaagggcctaagcatcgccgacctcgcctgtgctcagtactacaacggaattatggtgctgccaggtgtcgctgacgcagagcggatggctatgtataccggcagtctcattggcgggattgcgttgggcggcctgacgtccgctgtctccatccctttctctctggctatacaagcccgactgaattatgtggccctgcagactgatgtcctgcaagaaaatcagaagattcttgccgccagcttcaacaaggccatgactaatattgtggatgcgtttaccggagtgaatgacgccatcacccaaacgtcccaagccctgcagacagtcgccacggcgttaaacaaaatccaggatgtagtgaatcagcaagggaacagcttgaatcacctgacgtcccagttaagacagaactttcaggcaatcagtagctcaatccaggctatctacgatcgattagatcctcctcaggcagatcagcaggtggatcggctcatcaccggccgcctcgcggcattgaatgttttcgtaagtcataccttgaccaagtacacggaggtgagggccagtcgccagctggctcagcaaaaagtgaatgagtgtgtgaaatcacagagcaaacggtacgggttttgtggaaatgggacgcacatctttagcatcgttaatgctgcccccgaagggttagtcttcctgcacactgtgctccttcctacccagtataaagatgtcgaagcatggtctgggctctgtgtcgatggaactaacggttatgtccttcgacagccaaacctcgctctctataaagaagggaattactataggatcacctcaagaatcatgttcgagcccaggataccaacaatggccgattttgtgcagattgaaaattgtaacgtgacctttgtgaatatcagtcgatccgagcttcaaacgattgttcctgagtacatcgacgtgaataaaactctacaagagctgtcctataaactgcctaattataccgtgcctgaccttgtagtcgagcaatacaaccagactattctgaacctgacatcggaaatctctacattggagaataaaagcgccgagctcaattacacagtgcagaagctgcagaccctgatcgacaatattaacagcactcttgtggacttaaagtggctgaaccgtgtggagacttacatcaagtggccctggtgggtgtggctctgtatttccgtggtccttatatttgttgtaagtatgctgctcctgagcttctggatgtgctctaatgggtctctacagtgtagaatatgtatttga

SEQ ID NO: 153 - protein, 1181 aa, Artificial Sequence
  PDI-229E -wtTMCT-AA
MAKNVAIFGLLFSLLVLVPSQIFAQTTNGLNTSYSVCNGCVGYSENVFAVESGGYIPSDFAFNNWFLLTNTSSVVDGVVRSFQPLLLNCLWSVSGLRFTTGFVYFNGTGRGDCKGFSSDVLSDVIRYNLNFEENLRRGTILFKTSYGVVVFYCTNNTLVSGDAHIPFGTVLGNFYCFVNTTIGNETTSAFVGALPKTVREFVISRTGHFYINGYRYFTLGNVEAVNFNVTTAETTDFCTVALASYADVLVNVSQTSIANIIYCNSVINRLRCDQLSFDVPDGFYSTSPIQSVELPVSIVSLPVYHKHTFIVLYVDFKPQSGGGKCFNCYPAGVNITLANFNETKGPLCVDTSHFTTKYVAVYANVGRWSASINTGNCPFSFGKVNNFVKFGSVCFSLKDIPGGCAMPIVANWAYSKYYTIGSLYVSWSDGDGITGVPQPVEGVSSFMNVTLDKCTKYNIYDVSGVGVIRVSNDTFLNGITYTSTSGNLLGFKDVTKGTIYSITPCNPPDQLVVYQQAVVGAMLSENFTSYGFSNVVELPKFFYASNGTYNCTDAVLTYSSFGVCADGSIIAVQPANVSYDSVSAIVTANLSIPSNWTTSVQVEYLQITSTPIVVDCSTYVCNGNVRCVELLKQYTSACKTIEDALRNSARLESADVSEMLTFDKKAFTLANVSSFGDYNLSSVIPSLPTSGSRVAGRSAIEDILFSKLVTSGLGTVDADYKKCTKGLSIADLACAQYYNGIMVLPGVADAERMAMYTGSLIGGIALGGLTSAVSIPFSLAIQARLNYVALQTDVLQENQKILAASFNKAMTNIVDAFTGVNDAITQTSQALQTVATALNKIQDVVNQQGNSLNHLTSQLRQNFQAISSSIQAIYDRLDPPQADQQVDRLITGRLAALNVFVSHTLTKYTEVRASRQLAQQKVNECVKSQSKRYGFCGNGTHIFSIVNAAPEGLVFLHTVLLPTQYKDVEAWSGLCVDGTNGYVLRQPNLALYKEGNYYRITSRIMFEPRIPTMADFVQIENCNVTFVNISRSELQTIVPEYIDVNKTLQELSYKLPNYTVPDLVVEQYNQTILNLTSEISTLENKSAELNYTVQKLQTLIDNINSTLVDLKWLNRVETYIKWPWWVWLCISVVLIFVVSMLLLCCCSTGCCGFFSCFASSIRGCCESTKLPYYDVEKIHIQ

SEQ ID NO: 154 - protein, 1163 aa, Artificial Sequence
  PDI-229E -H5iTMCT-AA
MAKNVAIFGLLFSLLVLVPSQIFAQTTNGLNTSYSVCNGCVGYSENVFAVESGGYIPSDFAFNNWFLLTNTSSVVDGVVRSFQPLLLNCLWSVSGLRFTTGFVYFNGTGRGDCKGFSSDVLSDVIRYNLNFEENLRRGTILFKTSYGVVVFYCTNNTLVSGDAHIPFGTVLGNFYCFVNTTIGNETTSAFVGALPKTVREFVISRTGHFYINGYRYFTLGNVEAVNFNVTTAETTDFCTVALASYADVLVNVSQTSIANIIYCNSVINRLRCDQLSFDVPDGFYSTSPIQSVELPVSIVSLPVYHKHTFIVLYVDFKPQSGGGKCFNCYPAGVNITLANFNETKGPLCVDTSHFTTKYVAVYANVGRWSASINTGNCPFSFGKVNNFVKFGSVCFSLKDIPGGCAMPIVANWAYSKYYTIGSLYVSWSDGDGITGVPQPVEGVSSFMNVTLDKCTKYNIYDVSGVGVIRVSNDTFLNGITYTSTSGNLLGFKDVTKGTIYSITPCNPPDQLVVYQQAVVGAMLSENFTSYGFSNVVELPKFFYASNGTYNCTDAVLTYSSFGVCADGSIIAVQPANVSYDSVSAIVTANLSIPSNWTTSVQVEYLQITSTPIVVDCSTYVCNGNVRCVELLKQYTSACKTIEDALRNSARLESADVSEMLTFDKKAFTLANVSSFGDYNLSSVIPSLPTSGSRVAGRSAIEDILFSKLVTSGLGTVDADYKKCTKGLSIADLACAQYYNGIMVLPGVADAERMAMYTGSLIGGIALGGLTSAVSIPFSLAIQARLNYVALQTDVLQENQKILAASFNKAMTNIVDAFTGVNDAITQTSQALQTVATALNKIQDVVNQQGNSLNHLTSQLRQNFQAISSSIQAIYDRLDPPQADQQVDRLITGRLAALNVFVSHTLTKYTEVRASRQLAQQKVNECVKSQSKRYGFCGNGTHIFSIVNAAPEGLVFLHTVLLPTQYKDVEAWSGLCVDGTNGYVLRQPNLALYKEGNYYRITSRIMFEPRIPTMADFVQIENCNVTFVNISRSELQTIVPEYIDVNKTLQELSYKLPNYTVPDLVVEQYNQTILNLTSEISTLENKSAELNYTVQKLQTLIDNINSTLVDLKWLNRVETYIKWPWWQILSIYSTVASSLALAIMMAGLSLWMCSNGSLQCRICI

SEQ ID NO: 155 - protein, 1159 aa, Artificial Sequence
  PDI-229E -H5iCT-AA
MAKNVAIFGLLFSLLVLVPSQIFAQTTNGLNTSYSVCNGCVGYSENVFAVESGGYIPSDFAFNNWFLLTNTSSVVDGVVRSFQPLLLNCLWSVSGLRFTTGFVYFNGTGRGDCKGFSSDVLSDVIRYNLNFEENLRRGTILFKTSYGVVVFYCTNNTLVSGDAHIPFGTVLGNFYCFVNTTIGNETTSAFVGALPKTVREFVISRTGHFYINGYRYFTLGNVEAVNFNVTTAETTDFCTVALASYADVLVNVSQTSIANIIYCNSVINRLRCDQLSFDVPDGFYSTSPIQSVELPVSIVSLPVYHKHTFIVLYVDFKPQSGGGKCFNCYPAGVNITLANFNETKGPLCVDTSHFTTKYVAVYANVGRWSASINTGNCPFSFGKVNNFVKFGSVCFSLKDIPGGCAMPIVANWAYSKYYTIGSLYVSWSDGDGITGVPQPVEGVSSFMNVTLDKCTKYNIYDVSGVGVIRVSNDTFLNGITYTSTSGNLLGFKDVTKGTIYSITPCNPPDQLVVYQQAVVGAMLSENFTSYGFSNVVELPKFFYASNGTYNCTDAVLTYSSFGVCADGSIIAVQPANVSYDSVSAIVTANLSIPSNWTTSVQVEYLQITSTPIVVDCSTYVCNGNVRCVELLKQYTSACKTIEDALRNSARLESADVSEMLTFDKKAFTLANVSSFGDYNLSSVIPSLPTSGSRVAGRSAIEDILFSKLVTSGLGTVDADYKKCTKGLSIADLACAQYYNGIMVLPGVADAERMAMYTGSLIGGIALGGLTSAVSIPFSLAIQARLNYVALQTDVLQENQKILAASFNKAMTNIVDAFTGVNDAITQTSQALQTVATALNKIQDVVNQQGNSLNHLTSQLRQNFQAISSSIQAIYDRLDPPQADQQVDRLITGRLAALNVFVSHTLTKYTEVRASRQLAQQKVNECVKSQSKRYGFCGNGTHIFSIVNAAPEGLVFLHTVLLPTQYKDVEAWSGLCVDGTNGYVLRQPNLALYKEGNYYRITSRIMFEPRIPTMADFVQIENCNVTFVNISRSELQTIVPEYIDVNKTLQELSYKLPNYTVPDLVVEQYNQTILNLTSEISTLENKSAELNYTVQKLQTLIDNINSTLVDLKWLNRVETYIKWPWWVWLCISVVLIFVVSMLLLSLWMCSNGSLQCRICI

SEQ ID NO: 156 - protein, 1156 aa, Artificial Sequence
  PDI-229E -H5iCT(V4)-AA
MAKNVAIFGLLFSLLVLVPSQIFAQTTNGLNTSYSVCNGCVGYSENVFAVESGGYIPSDFAFNNWFLLTNTSSVVDGVVRSFQPLLLNCLWSVSGLRFTTGFVYFNGTGRGDCKGFSSDVLSDVIRYNLNFEENLRRGTILFKTSYGVVVFYCTNNTLVSGDAHIPFGTVLGNFYCFVNTTIGNETTSAFVGALPKTVREFVISRTGHFYINGYRYFTLGNVEAVNFNVTTAETTDFCTVALASYADVLVNVSQTSIANIIYCNSVINRLRCDQLSFDVPDGFYSTSPIQSVELPVSIVSLPVYHKHTFIVLYVDFKPQSGGGKCFNCYPAGVNITLANFNETKGPLCVDTSHFTTKYVAVYANVGRWSASINTGNCPFSFGKVNNFVKFGSVCFSLKDIPGGCAMPIVANWAYSKYYTIGSLYVSWSDGDGITGVPQPVEGVSSFMNVTLDKCTKYNIYDVSGVGVIRVSNDTFLNGITYTSTSGNLLGFKDVTKGTIYSITPCNPPDQLVVYQQAVVGAMLSENFTSYGFSNVVELPKFFYASNGTYNCTDAVLTYSSFGVCADGSIIAVQPANVSYDSVSAIVTANLSIPSNWTTSVQVEYLQITSTPIVVDCSTYVCNGNVRCVELLKQYTSACKTIEDALRNSARLESADVSEMLTFDKKAFTLANVSSFGDYNLSSVIPSLPTSGSRVAGRSAIEDILFSKLVTSGLGTVDADYKKCTKGLSIADLACAQYYNGIMVLPGVADAERMAMYTGSLIGGIALGGLTSAVSIPFSLAIQARLNYVALQTDVLQENQKILAASFNKAMTNIVDAFTGVNDAITQTSQALQTVATALNKIQDVVNQQGNSLNHLTSQLRQNFQAISSSIQAIYDRLDPPQADQQVDRLITGRLAALNVFVSHTLTKYTEVRASRQLAQQKVNECVKSQSKRYGFCGNGTHIFSIVNAAPEGLVFLHTVLLPTQYKDVEAWSGLCVDGTNGYVLRQPNLALYKEGNYYRITSRIMFEPRIPTMADFVQIENCNVTFVNISRSELQTIVPEYIDVNKTLQELSYKLPNYTVPDLVVEQYNQTILNLTSEISTLENKSAELNYTVQKLQTLIDNINSTLVDLKWLNRVETYIKWPWWVWLCISVVLIFVVSMLLLCCSNGSLQCRICI

SEQ ID NO: 157 - protein, 1159 aa, Artificial Sequence
  PDI-229E-H1cCT-AA
MAKNVAIFGLLFSLLVLVPSQIFAQTTNGLNTSYSVCNGCVGYSENVFAVESGGYIPSDFAFNNWFLLTNTSSVVDGVVRSFQPLLLNCLWSVSGLRFTTGFVYFNGTGRGDCKGFSSDVLSDVIRYNLNFEENLRRGTILFKTSYGVVVFYCTNNTLVSGDAHIPFGTVLGNFYCFVNTTIGNETTSAFVGALPKTVREFVISRTGHFYINGYRYFTLGNVEAVNFNVTTAETTDFCTVALASYADVLVNVSQTSIANIIYCNSVINRLRCDQLSFDVPDGFYSTSPIQSVELPVSIVSLPVYHKHTFIVLYVDFKPQSGGGKCFNCYPAGVNITLANFNETKGPLCVDTSHFTTKYVAVYANVGRWSASINTGNCPFSFGKVNNFVKFGSVCFSLKDIPGGCAMPIVANWAYSKYYTIGSLYVSWSDGDGITGVPQPVEGVSSFMNVTLDKCTKYNIYDVSGVGVIRVSNDTFLNGITYTSTSGNLLGFKDVTKGTIYSITPCNPPDQLVVYQQAVVGAMLSENFTSYGFSNVVELPKFFYASNGTYNCTDAVLTYSSFGVCADGSIIAVQPANVSYDSVSAIVTANLSIPSNWTTSVQVEYLQITSTPIVVDCSTYVCNGNVRCVELLKQYTSACKTIEDALRNSARLESADVSEMLTFDKKAFTLANVSSFGDYNLSSVIPSLPTSGSRVAGRSAIEDILFSKLVTSGLGTVDADYKKCTKGLSIADLACAQYYNGIMVLPGVADAERMAMYTGSLIGGIALGGLTSAVSIPFSLAIQARLNYVALQTDVLQENQKILAASFNKAMTNIVDAFTGVNDAITQTSQALQTVATALNKIQDVVNQQGNSLNHLTSQLRQNFQAISSSIQAIYDRLDPPQADQQVDRLITGRLAALNVFVSHTLTKYTEVRASRQLAQQKVNECVKSQSKRYGFCGNGTHIFSIVNAAPEGLVFLHTVLLPTQYKDVEAWSGLCVDGTNGYVLRQPNLALYKEGNYYRITSRIMFEPRIPTMADFVQIENCNVTFVNISRSELQTIVPEYIDVNKTLQELSYKLPNYTVPDLVVEQYNQTILNLTSEISTLENKSAELNYTVQKLQTLIDNINSTLVDLKWLNRVETYIKWPWWVWLCISVVLIFVVSMLLLSFWMCSNGSLQCRICI

SEQ ID NO: 158 - protein, 1360 aa, OC43-Coronavirus
MFLILLISLPTAFAVIGDLNCTLDPRLKGSFNNRDTGPPSISIDTVDVTNGLGTYYVLDRVYLNTTLFLNGYYPTSGSTYRNMALKGTDLLSTLWFKPPFLSDFINGIFAKVKNTKVFKDGVMYSEFPAITIGSTFVNTSYSVVVQPRTINSTQDGVNKLQGLLEVSVCQYNMCEYPHTICHPNLGNHFKELWHYDTGVVSCLYKRNFTYDVNATYLYFHFYQEGGTFYAYFTDTGFVTKFLFNVYLGMALSHYYVMPLTCIRRPKDGFSLEYWVTPLTPRQYLLAFNQDGIIFNAVDCMSDFMSEIKCKTQSIAPPTGVYELNGYTVQPVADVYRRKPDLPNCNIEAWLNDKSVPSPLNWERKTFSNCNFNMSSLMSFIQADSFTCNNIDAAKIYGMCFSSITIDKFAIPNRRKVDLQLGNLGYLQSSNYRIDTTATSCQLYYNLPAANVSVSRFNPSTWNKRFGFIEDSVFVPQPTGVFTNHSVVYAQHCFKAPKNFCPCSSCSCPGKNNGIGTCPAGTNSLTCDNLCTLDPITLKAPDTYKCPQSKSLVGIGEHCSGLAVKSDYCGNNSCTCQPQAFLGWSADSCLQGDKCNIFANFILHDVNNGLTCSTDLQKANTEIELGVCVNYDLYGISGQGIFVEVNATYYNSWQNLLYDSNGNLYGFRDYITNRTFMIHSCYSGRVSAAYHANSSEPALLFRNIKCNYVFNNSLTRQLQPINYSFDSYLGCVVNAYNSTAISVQTCDLTVGSGYCVDYSKNRRSRRAITTGYRFTNFEPFTVNSVNDSLEPVGGLYEIQIPSEFTIGNMEEFIQTSSPKVTIDCAAFVCGDYAACKLQLVEYGSFCDNINAILTEVNELLDTTQLQVANSLMNGVTLSTKLKDGVNFNVDDINFSPVLGCLGSECSKASSRSAIEDLLFDKVKLSDVGFVEAYNNCTGGAEIRDLICVQSYKGIKVLPPLLSENQISGYTLAATSASLFPPWTAAAGVPFYLNVQYRINGLGVTMDVLSQNQKLIANAFNNALHAIQQGFDATNSALVKIQAVVNANAEALNNLLQQLSNRFGAISASLQEILSRLDALEAEAQIDRLINGRLTALNAYVSQQLSDSTLVKFSAAQAMEKVNECVKSQSSRINFCGNGNHIISLVQNAPYGLYFIHFNYVPTKYVTAKVSPGLCIAGNRGIAPKSGYFVNVNNTWMYTGSGYYYPEPITENNVVVMSTCAVNYTKAPYVMLNTSIPNLPDFKEELDQWFKNQTSVAPDLSLDYINVTFLDLQVEMNRLQEAIKVLNHSYINLKDIGTYEYYVKWPWYVWLLICLAGVAMLVLLFFICCCTGCGTSCFKKCGGCCDDYTGYQELVIKTSHDD

SEQ ID NO: 159 - protein, 1173 aa, 229E Coronavirus
MFVLLVAYALLHIAGCQTTNGLNTSYSVCNGCVGYSENVFAVESGGYIPSDFAFNNWFLLTNTSSVVDGVVRSFQPLLLNCLWSVSGLRFTTGFVYFNGTGRGDCKGFSSDVLSDVIRYNLNFEENLRRGTILFKTSYGVVVFYCTNNTLVSGDAHIPFGTVLGNFYCFVNTTIGNETTSAFVGALPKTVREFVISRTGHFYINGYRYFTLGNVEAVNFNVTTAETTDFCTVALASYADVLVNVSQTSIANIIYCNSVINRLRCDQLSFDVPDGFYSTSPIQSVELPVSIVSLPVYHKHTFIVLYVDFKPQSGGGKCFNCYPAGVNITLANFNETKGPLCVDTSHFTTKYVAVYANVGRWSASINTGNCPFSFGKVNNFVKFGSVCFSLKDIPGGCAMPIVANWAYSKYYTIGSLYVSWSDGDGITGVPQPVEGVSSFMNVTLDKCTKYNIYDVSGVGVIRVSNDTFLNGITYTSTSGNLLGFKDVTKGTIYSITPCNPPDQLVVYQQAVVGAMLSENFTSYGFSNVVELPKFFYASNGTYNCTDAVLTYSSFGVCADGSIIAVQPRNVSYDSVSAIVTANLSIPSNWTTSVQVEYLQITSTPIVVDCSTYVCNGNVRCVELLKQYTSACKTIEDALRNSARLESADVSEMLTFDKKAFTLANVSSFGDYNLSSVIPSLPTSGSRVAGRSAIEDILFSKLVTSGLGTVDADYKKCTKGLSIADLACAQYYNGIMVLPGVADAERMAMYTGSLIGGIALGGLTSAVSIPFSLAIQARLNYVALQTDVLQENQKILAASFNKAMTNIVDAFTGVNDAITQTSQALQTVATALNKIQDVVNQQGNSLNHLTSQLRQNFQAISSSIQAIYDRLDTIQADQQVDRLITGRLAALNVFVSHTLTKYTEVRASRQLAQQKVNECVKSQSKRYGFCGNGTHIFSIVNAAPEGLVFLHTVLLPTQYKDVEAWSGLCVDGTNGYVLRQPNLALYKEGNYYRITSRIMFEPRIPTMADFVQIENCNVTFVNISRSELQTIVPEYIDVNKTLQELSYKLPNYTVPDLVVEQYNQTILNLTSEISTLENKSAELNYTVQKLQTLIDNINSTLVDLKWLNRVETYIKWPWWVWLCISVVLIFVVSMLLLCCCSTGCCGFFSCFASSIRGCCESTKLPYYDVEKIHIQ

SEQ ID NO: 160 - protein, 1346 aa, OC43 Coronavirus
VIGDLNCTLDPRLKGSFNNRDTGPPSISIDTVDVTNGLGTYYVLDRVYLNTTLFLNGYYPTSGSTYRNMALKGTDLLSTLWFKPPFLSDFINGIFAKVKNTKVFKDGVMYSEFPAITIGSTFVNTSYSVVVQPRTINSTQDGVNKLQGLLEVSVCQYNMCEYPHTICHPNLGNHFKELWHYDTGVVSCLYKRNFTYDVNATYLYFHFYQEGGTFYAYFTDTGFVTKFLFNVYLGMALSHYYVMPLTCIRRPKDGFSLEYWVTPLTPRQYLLAFNQDGIIFNAVDCMSDFMSEIKCKTQSIAPPTGVYELNGYTVQPVADVYRRKPDLPNCNIEAWLNDKSVPSPLNWERKTFSNCNFNMSSLMSFIQADSFTCNNIDAAKIYGMCFSSITIDKFAIPNRRKVDLQLGNLGYLQSSNYRIDTTATSCQLYYNLPAANVSVSRFNPSTWNKRFGFIEDSVFVPQPTGVFTNHSVVYAQHCFKAPKNFCPCSSCSCPGKNNGIGTCPAGTNSLTCDNLCTLDPITLKAPDTYKCPQSKSLVGIGEHCSGLAVKSDYCGNNSCTCQPQAFLGWSADSCLQGDKCNIFANFILHDVNNGLTCSTDLQKANTEIELGVCVNYDLYGISGQGIFVEVNATYYNSWQNLLYDSNGNLYGFRDYITNRTFMIHSCYSGRVSAAYHANSSEPALLFRNIKCNYVFNNSLTRQLQPINYSFDSYLGCVVNAYNSTAISVQTCDLTVGSGYCVDYSKNRRSRRAITTGYRFTNFEPFTVNSVNDSLEPVGGLYEIQIPSEFTIGNMEEFIQTSSPKVTIDCAAFVCGDYAACKLQLVEYGSFCDNINAILTEVNELLDTTQLQVANSLMNGVTLSTKLKDGVNFNVDDINFSPVLGCLGSECSKASSRSAIEDLLFDKVKLSDVGFVEAYNNCTGGAEIRDLICVQSYKGIKVLPPLLSENQISGYTLAATSASLFPPWTAAAGVPFYLNVQYRINGLGVTMDVLSQNQKLIANAFNNALHAIQQGFDATNSALVKIQAVVNANAEALNNLLQQLSNRFGAISASLQEILSRLDALEAEAQIDRLINGRLTALNAYVSQQLSDSTLVKFSAAQAMEKVNECVKSQSSRINFCGNGNHIISLVQNAPYGLYFIHFNYVPTKYVTAKVSPGLCIAGNRGIAPKSGYFVNVNNTWMYTGSGYYYPEPITENNVVVMSTCAVNYTKAPYVMLNTSIPNLPDFKEELDQWFKNQTSVAPDLSLDYINVTFLDLQVEMNRLQEAIKVLNHSYINLKDIGTYEYYVKWPWYVWLLICLAGVAMLVLLFFICCCTGCGTSCFKKCGGCCDDYTGYQELVIKTSHDD

SEQ ID NO: 161 - protein, 1157 aa, 229E Coronavirus
QTTNGLNTSYSVCNGCVGYSENVFAVESGGYIPSDFAFNNWFLLTNTSSVVDGVVRSFQPLLLNCLWSVSGLRFTTGFVYFNGTGRGDCKGFSSDVLSDVIRYNLNFEENLRRGTILFKTSYGVVVFYCTNNTLVSGDAHIPFGTVLGNFYCFVNTTIGNETTSAFVGALPKTVREFVISRTGHFYINGYRYFTLGNVEAVNFNVTTAETTDFCTVALASYADVLVNVSQTSIANIIYCNSVINRLRCDQLSFDVPDGFYSTSPIQSVELPVSIVSLPVYHKHTFIVLYVDFKPQSGGGKCFNCYPAGVNITLANFNETKGPLCVDTSHFTTKYVAVYANVGRWSASINTGNCPFSFGKVNNFVKFGSVCFSLKDIPGGCAMPIVANWAYSKYYTIGSLYVSWSDGDGITGVPQPVEGVSSFMNVTLDKCTKYNIYDVSGVGVIRVSNDTFLNGITYTSTSGNLLGFKDVTKGTIYSITPCNPPDQLVVYQQAVVGAMLSENFTSYGFSNVVELPKFFYASNGTYNCTDAVLTYSSFGVCADGSIIAVQPRNVSYDSVSAIVTANLSIPSNWTTSVQVEYLQITSTPIVVDCSTYVCNGNVRCVELLKQYTSACKTIEDALRNSARLESADVSEMLTFDKKAFTLANVSSFGDYNLSSVIPSLPTSGSRVAGRSAIEDILFSKLVTSGLGTVDADYKKCTKGLSIADLACAQYYNGIMVLPGVADAERMAMYTGSLIGGIALGGLTSAVSIPFSLAIQARLNYVALQTDVLQENQKILAASFNKAMTNIVDAFTGVNDAITQTSQALQTVATALNKIQDVVNQQGNSLNHLTSQLRQNFQAISSSIQAIYDRLDTIQADQQVDRLITGRLAALNVFVSHTLTKYTEVRASRQLAQQKVNECVKSQSKRYGFCGNGTHIFSIVNAAPEGLVFLHTVLLPTQYKDVEAWSGLCVDGTNGYVLRQPNLALYKEGNYYRITSRIMFEPRIPTMADFVQIENCNVTFVNISRSELQTIVPEYIDVNKTLQELSYKLPNYTVPDLVVEQYNQTILNLTSEISTLENKSAELNYTVQKLQTLIDNINSTLVDLKWLNRVETYIKWPWWVWLCISVVLIFVVSMLLLCCCSTGCCGFFSCFASSIRGCCESTKLPYYDVEKIHIQ

SEQ ID NO: 162 - protein, 56 aa, Artificial Sequence
  TMCT region of modified PDI-OC43-COV wtTMCT-AA
WYVWLLICLAGVAMLVLLFFICCCTGCGTSCFKKCGGCCDDYTGYQELVIKTSHDD

SEQ ID NO: 163 - protein, 40 aa, Artificial Sequence; identical to SEQ ID NO: 117
  TMCT region of modified PDI-OC43-COV H5iTMCT-AA

SEQ ID NO: 164 - protein, 37 aa, Artificial Sequence
  TMCT region of modified PDI-OC43-COV H5iCT-AA
WYVWLLICLAGVAMLVLLFFISLWMCSNGSLQCRICI

SEQ ID NO: 165 - protein, 34 aa, Artificial Sequence
  TMCT region of modified PDI-OC43-COV H5iCT(V4)-AA
WYVWLLICLAGVAMLVLLFFICCSNGSLQCRICI

SEQ ID NO: 166 - protein, 37 aa, Artificial Sequence
  TMCT region of modified PDI-OC43-COV H1cCT-AA
WYVWLLICLAGVAMLVLLFFISFWMCSNGSLQCRICI

SEQ ID NO: 167 - protein, 58 aa, Artificial Sequence
  TMCT region of modified PDI-229E-wtTMCT-AA
WWVWLCISVVLIFVVSMLLLCCCSTGCCGFFSCFASSIRGCCESTKLPYYDVEKIHIQ

SEQ ID NO: 168 - protein, 40 aa, Artificial Sequence
  TMCT region of modified PDI-229E-H5iTMCT-AA
WWQILSIYSTVASSLALAIMMAGLSLWMCSNGSLQCRICI

SEQ ID NO: 169 - protein, 36 aa, Artificial Sequence
  TMCT region of modified PDI-229E-H5iCT-AA
WWVWLCISVVLIFVVSMLLLSLWMCSNGSLQCRICI

SEQ ID NO: 170 - protein, 33 aa, Artificial Sequence
  TMCT region of modified PDI-229E-H5iCT(V4)-AA
WWVWLCISVVLIFVVSMLLLCCSNGSLQCRICI

SEQ ID NO: 171 - protein, 35 aa, Artificial Sequence
  TMCT region of modified PDI-229E-H1cCT-AA
WVWLCISVVLIFVVSMLLLSFWMCSNGSLQCRICI

SEQ ID NO: 172 - protein, 43 aa, Artificial Sequence
  TM/CT Region of Modified OC43-CoV S protein with intervening peptide sequence Xn
  MISC_FEATURE (22)..(31): Xaa may be absent or present
  misc_feature (37)..(38): Xaa can be any naturally occurring amino acid
  misc_feature (40)..(40): Xaa can be any naturally occurring amino acid
WYVWLLICLAGVAMLVLLFFIXXXXXXXXXXCSNGSXXCXICI

SEQ ID NO: 173 - protein, 42 aa, Artificial Sequence
  TM/CT Region of Modified OC43-CoV S protein with intervening peptide sequence Xn
  MISC_FEATURE (21)..(30): Xaa may be absent or present
  misc_feature (36)..(37): Xaa can be any naturally occurring amino acid
  misc_feature (39)..(39): Xaa can be any naturally occurring amino acid
WWVWLCISVVLIFVVSMLLLXXXXXXXXXXCSNGSXXCXICI
